(19) United States
(12) Patent Application Publication
(10) Pub. No.: US 2011/0086389 A1
(43) Pub. Date: Apr. 14, 2011

(54) Compositions and Methods for Expressing In-Frame Multimeric Proteins

(76) Inventors: James Oliver Dolly, Dublin (IE); Oleg Shamotienko, London (GB)

(21) Appl. No.: 12/915,333

(22) Filed: Oct. 29, 2010

Related U.S. Application Data
(63) Continuation-in-part of application No. PCT/EP90/55304, filed on Apr. 30, 2009.
(60) Provisional application No. 61/126,215, filed on Apr. 30, 2008.

(51) Int. Cl. C12P 21/06; C40B 40/06

(52) U.S. Cl. 435/69.1; 506/16

(57) ABSTRACT

The present invention concerns methods and compositions for making and using multimeric, single chain proteins of a defined structure. In various embodiments the invention involves a bank or collection of one or more monomer nucleic acid species with each such nucleic acid species encoding a protein monomer subunit species and divided into separate subspecies, each bearing a distinct pair of position-specific subcloning restriction endonuclease recognition sites for cassette style cloning into an expression vector and making multimeric, single chain proteins of a defined structure.

### CROSS REFERENCE TO RELATED APPLICATIONS

[0001] This application is a continuation-in-part of International Patent Application PCT/EP2009/055304, filed Apr. 30, 2009, which claimed priority to U.S. Provisional application Ser. No. 61/126,215 filed Apr. 30, 2008. The disclosure of each of these documents is expressly hereby incorporated by reference in its entirety.

### BACKGROUND OF THE INVENTION

[0002] The nervous system is a feature of all chordates, including mammals, as well as other relatively modern organisms, from worms and slugs to human beings. The nervous system is responsible for sensory, autonomic and motor functions as well as for cognitive functions found in higher animals. The nervous system generally comprises a brain or central processing nerve bundle (ganglion), and various nerves (including other ganglia) or nerve cells which carry sensory information from the body back to the brain and instructions from the brain to the various organs and tissues of the body.

[0003] The nerve cell or neuron comprises the basic unit of nerve tissue. The neuron generates and/or conveys information by means of electrical impulses generated and transmitted by the neuron in response to external stimuli, either originating from another nerve cell or from signals in the extracellular milieu. These electrical impulses are possible due to the existence of chemical and electrical gradients formed due to differences in the amounts of charged ions in the cytoplasm of the neuron as compared to the extracellular medium. The gradients are maintained in part by the cell membrane, which is comprised of a lipid bilayer, which provides a barrier preventing facile diffusion of charged ions and molecules between the interior and exterior of the cell, as well as an electrical insulation between the two. The electrical potential difference across the cell membrane is termed the membrane potential. Every living cell has a membrane potential. However nerve cells (and related muscle and gland cells) are thought to be unique in generating and responding to brief changes in the membrane potential as the basis for electrical signaling.

[0004] The ions existing within nerve cells comprise organic ions (such as charged peptides and amino acids) and inorganic ions. The main intracellular cation is potassium ion (K⁺). Inorganic anions include chloride (Cl⁻), phosphate (PO₄⁻⁻), and sulfate (SO₄⁻⁻). The main extracellular cation is Na⁺ and the main extracellular anion is Cl⁻. Thus, the electrical activity of nerve cells is derived from the unequal distribution of ions across the cell membrane and the membranes changing permabilities to these ions.

[0005] The chemical gradient creates a chemical force tending to move each ion as necessary to achieve homogeneity with respect to that ion on both sides of the cell membrane; while the amount of diffusion across the membrane is small, given enough time this chemical force would, for example, deplete the cell of the K+ sequestered within the cell despite the relatively high impermeability of the cell membrane.

[0006] To prevent leakage of electrical charge from inside the cell, the cell membrane contains a metabolic pump (the Na⁺, K+ pump) that maintains the gradient by active transport, moving K+ within the cell (against its concentration gradient) using energy derived from the hydrolysis of ATP to ADP (due to an integral ATPase activity). The Na⁺, K+ ATPase contains an α-subunit of about 100,000 Daltons coupled to a glycoprotein β-subunit of approximately 45,000 Daltons. The amino acid sequence of the α-subunit is known, and comprises 8 transmembrane regions with a large cytosolic domain between transmembrane regions 4 and 5 which contains the ATP hydrolysis site. Binding sites for Na⁺ and K⁺ have also been identified.

[0007] The pump transports two different ions in different directions across the membrane. K⁺ ion is bound on the extracellular surface of the pump. The pump is then dephosphorylated, resulting in an allosteric conformation change and transport of the K⁺ ion into the cytoplasm against the concentration and electrical gradient. In a second step, Na⁺ is bound to the cytoplasmic domain of the Na⁺, K⁺ pump, triggering another conformational change, resulting in phosphorylation of the pump at the ATP binding site and transport of the Na⁺ ion against its concentration gradient to the exterior of the cell.

[0008] Although the Na⁺/K⁺ pump is an important mechanism of ion transport across membranes, other mechanisms include passive diffusion, bulk flow, facilitated (carrier-mediated) diffusion, exchange diffusion, co-transport, and metabolic and proton pumps. All these mechanisms contribute to maintenance of the membrane potential in neurons although the influence or precise combination of these mechanisms may be different in different neurons.

[0009] The ability of a neuron to “fire” (create or transmit an electrical impulse or “action potential”) involves a transient depolarization of the membrane potential of that cell. A depolarization means that the interior of the neuron becomes less negative (and indeed often becomes positive) relative to the exterior of the cell. For example, in squid axons the interior of the cell becomes almost 50 mV positive. This action potential is dependent upon the presence of sodium ions in the external medium.

[0010] Thus, the action potential generally involves a selective and transient change in membrane permeability for sodium, causing an inward rush of positively charged sodium ions down their concentration gradient. The energy for this inward migration of sodium is provided by the electrochemical sodium gradient across the cell membrane. However, the mechanism involves a Na⁺ selective transmembrane channel (the Na⁺ channel) which responds to small changes in membrane potential (small depolarizations) by becoming permeable to Na⁺ ion.

[0011] Early work on the Na⁺ channel in the electric eel, Electrophorus electricus, showed the Electrophorus sodium channel to be a single linear polypeptide having a molecular weight of 260,000 to 300,000 Daltons. The amino acid sequence of the sodium channel has been solved and the cDNA comprises a chain of 7230 nucleotides encoding a polypeptide of 1820 amino acids. Analysis of the nature of the amino acid sequence reveals 4 domains (equivalent to linked subunits) of about 300 amino acids each having internal sequence homology. Additionally, there are six transmembrane segments within each of the four domains. A tertiary structure of the polypeptide revealed that the four domains are arranged symmetrically around a central pore or channel. At the resting potential the Na⁺ channel is blocked. When the membrane is depolarized, the channel is unblocked, permitting the ingress of Na⁺ ions from outside. A voltage-sensitive region of the Na⁺ channel (thought to reside in an excess of positively charged residues in transmembrane segment 4) responds to increasing membrane depolarization, presumably through an allosteric change permitting the selective influx of sodium ions. The pore forming region of the Na⁺ channel has a cross section no larger than 0.3-0.5 nm to prevent other, larger ions from entering the cell membrane. A highly hydrophobic loop between transmembrane segments 5 and 6 of each domain is thought to form the face of the pore.

[0012] Once the Na⁺ channel has been opened to permit Na⁺ ions to enter the neuron, the channel must be subsequently closed to permit the membrane potential to be restored, and the channel to activate again. An intracellular domain of the sodium channel is implicated in this process and appears to act as an “inactivation gate” able to plug the inside mouth of the pore, thus preventing the passage of Na⁺ ions depending on the voltage across the membrane.

[0013] Voltage clamp measurements indicate that Na⁺ conductance is involved in a positive feedback relationship with membrane depolarization. Thus, when the membrane begins to be depolarized, the Na⁺ conductance begins to increase, which depolarizes the membrane even more, and so forth. Thus below a given threshold of initial depolarization the channel will fail to fire, but above this initial threshold the channel will open to Na⁺ and the feedback mechanism will take over in an “all or nothing” fashion.

[0014] The voltage gated sodium channel is a protein in which the homologous domains discussed so far are referred to as the “α subunit”; as described, forming the pore or “core” of the channel. The α subunit is capable of forming a voltage gated, sodium selective channel alone. However, often the α subunit is found to be associated in a complex with β subunits which can give rise to altered voltage dependence and cellular localization.

[0015] The family of voltage gated sodium channels has nine known α protein members, with amino acid identity >50% in the transmembrane and extracellular loop region of each subunit. The standardized nomenclature for sodium channels is outlined below.

[0016] The proteins of these channels are named Nav1.1 through Nav1.9. The gene names are referred to as SCN1A through SCN11A (the SCN6/7A gene is part of the Nax sub-family and has uncertain function). The nucleic acid and protein sequences of these subunits reveal likely evolutionary relationships between these channel subunits. The individual sodium channels are distinguished not only by differences in their sequence but also by their kinetics and expression profiles. Some of these data is summarized in Table 1, below.

TABLE 1

| | | GenBank | | | Associated |
|---|---|---|---|---|---|
| Protein | | Accession | Auxiliary | Expression | Human |
| Name | Gene | Number | Subunits | Profile | Channelopathies |
| Naᵥα1.1 | SCN1A | AB093548 | β¹, β2, β3, β4 | Central | Inherited |
| | | | | neurons and | febrile |
| | | | | cardiac | epilepsy, GEFS |
| | | | | myocytes | and myoclonic |
| | | | | | epilepsy |
| Naᵥα1.2 | SCN2A | AB208888 | β₁, β₂, β₃, β₄ | Central | inherited |
| | | | | neurons | febrile seizures |
| | | | | | and epilepsy |
| Naᵥα1.3 | SCN3A | AF035685 | β₁, β₃ | Central | none known |
| | | | | neurons and | |
| | | | | cardiac | |
| | | | | myocytes | |
| Naᵥα1.4 | SCN4A | U24693 | β₁ | Skeletal | hyperkalemic |
| | | | | muscle | periodic |
| | | | | | paralysis, |
| | | | | | Paramyotonia |
| | | | | | congenita, and |
| | | | | | potassium- |
| | | | | | aggravated |
| | | | | | myotonia |
| Naᵥα1.5 | SCN5A | AJ310893 | β₁, β₂, β₃, β₄ | Central | Long QT |
| | | | | neurons, | Syndrome, |
| | | | | cardiac | Brugada |
| | | | | myocytes | syndrome, and |
| | | | | | idiopathic |
| | | | | | ventricular |
| | | | | | fibrillation |
| Naᵥα1.6 | SCN8A | AB027567 | β₁, β₂ | Central | none known |
| | | | | neurons, | |
| | | | | dorsal root | |
| | | | | ganglia, | |
| | | | | peripheral | |
| | | | | neurons | |
| Naᵥα1.7 | SCN9A | X82835 | β₁, β₂ | Dorsal root | Erythromelalgia |
| | | | | ganglia, | and |
| | | | | sympathetic | Channelopathy- |
| | | | | neurons, | associated |
| | | | | Schwann cells, | insensitivity to |
| | | | | and | pain |
| | | | | neuroendocrine | |
| | | | | cells | |
| Naᵥα1.8 | SCN10A | AF117907 | unknown | Dorsal root | none known |
| | | | | ganglia | |
| Naᵥα1.9 | SCN11A | AF126739 | unknown | Dorsal root | none known |
| | | | | ganglia | |

[0017] The currently known β sodium channel subunits are as follows: Naᵥβ1, Naᵥβ2, Naᵥβ3 and Naᵥβ4.

[0018] In addition to the Na⁺ channel, neurons (and other cells) have Ca⁺⁺ channels and K⁺ channels. These channels have a high degree of amino acid sequence homology with the sodium channel, and their tertiary structures are very similar as well. Like the sodium channel, the Ca⁺⁺ channel has 4 domains and six transmembrane segments, a voltage-sensor activity in the 4^{th} segment, and a domain that lines the interior of the pore. The calcium channel is generally responsible for “short distance” or localized Ca⁺⁺-mediated impulses related to functions controlled within the cell by Ca⁺⁺ ions.

[0019] There are several different kinds of high voltage-gated calcium channels (HVGCCs). They are structurally homologous among varying types; they are all similar, but not structurally identical. In the laboratory, it is possible to tell them apart by studying their physiological roles and/or inhibition by specific toxins. High voltage-gated calcium channels include the neural N-type channel blocked by ω-conotoxinGVIA, the R-type channel (R stands for resistant to the other blockers and toxins) involved in poorly defined processes in the brain, the closely related P/Q-type channel blocked by ω-agatoxins, and the dihydropyridine-sensitive L-type channels responsible for excitation-contraction coupling of skeletal, smooth, and cardiac muscle and for hormone secretion in endocrine cells.

[0020] There are at least two broad classes of Ca⁺⁺ channel; In the first type, a relatively small depolarization causes transient activation of the channel. These channels are called “T” (or transient) channels; T channels are used by cells to shape the patterns of impulse discharge into bursts. R-type calcium channels respond to intermediate levels of depolarization. The other type of channel requires a stronger depolaraization but continues to open and close during the sustained depolarization. These channels are called “L” (or long lasting) channels, and are (non-exclusively) involved in the control of secretion of neurotransmitters at neural synapses.

[0021] The α1 subunit pore is the primary subunit necessary for channel functioning in the HVGCC, and consists of the characteristic four homologous I-IV domains containing six transmembrane α-helices each. The α1 subunit forms the Ca2+ selective pore, which contains voltage sensing machinery and the drug/toxin binding sites. To date a total of ten α1 subunits have been identified in humans, all sharing significant amino acid sequence homology (about 75% to about 90% homology). These are listed in Table 2, below, where the SEQ ID Nos are given in pairs with the odd numbered SEQ ID Nos comprising the nucleotide sequence and the even numbered SEQ ID Nos comprising the protein sequence for that subunit. These α1 subunits may be found in complex with other auxiliary subunits, such as the α2, β, γ and δ subunits, which help shape the activation and deactivation kinetics, and current amplitude.

TABLE 2

| | | α1 | | | |
|---|---|---|---|---|---|
| | | Subunit | GenBank | | |
| | | (Gene | Accession | Associated | Most Often |
| Type | Voltage | Name) | Number | Subunits | Found In |
| L-type | HVA (high | Cav1.1 | L33798 (SEQ | α₂δ, β, γ | Skeletal |
| calcium | voltage | (CACNA1S) | ID NOS 1-2) | | muscle, bone |
| channel (also | activated) | Cav1.2 | AF070589 | | (osteoblasts), |
| known as | | (CACNA1C) | (SEQ ID NOS | | ventricular |
| “Long- | | | 3-4) | | myocytes |
| Lasting” and | | Cav1.3 | AB209171 | | (responsible |
| “DHP | | (CACNA1D) | (SEQ ID NOS | | for prolonged |
| Receptor”) | | | 5-6) | | action |
| | | Cav1.4 | AA019975 | | potential in |
| | | (CACNA1F) | (SEQ ID NO: | | cardiac cell; |
| | | | 7) | | also termed |
| | | | | | DHP |
| | | | | | receptors), |
| | | | | | dendrites and |
| | | | | | dendritic |
| | | | | | spines of |
| | | | | | cortical |
| | | | | | neurones |
| P-type | HVA (high | Cav2.1 | U79666 (SEQ | α₂δ, β, | Purkinje |
| calcium | voltage | (CACNA1A) | ID NOS 8-9) | possibly γ | neurons in the |
| channel/Q- | activated) | | | | cerebellum/ |
| type calcium | | | | | Cerebellar |
| channel | | | | | granule cells |
| N-type | HVA (high | Cav2.2 | AB209467 | α₂δ/β1, | Throughout the |
| calcium | voltage | (CACNA1B) | (SEQ ID NOS | β3, β4, | brain |
| channel | activated) | | 10-11) | possibly γ | |
| (“Neural”) | | | | | |
| R-type | intermediate | Cav2.3 | AK096563(SEQ | α₂δ, β, | Cerebellar |
| calcium | voltage | (CACNA1E) | ID NO: 12) | possibly γ | granule cells, |
| channel | activated | | | | other neurons |
| T-type | low voltage | Cav3.1 | AC004590(SEQ | | neurons, cells |
| calcium | activated | (CACNA1G) | ID NO: 13) | | that have |
| channel | | CaV3.2 | AL031703(SEQ | | pacemaker |
| (“Transient”) | | (CACNA1H) | ID NOS 14-15) | | activity, bone |
| | | CaV3.3 | AF129133(SEQ | | (osteocytes) |
| | | (CACNA1I) | ID NOS 16-17) | | |

[0022] The potassium gradient across the cells membrane is in the opposite direction from the Na and Ca++ gradients. That is, the concentration of K+ ions within the cell is higher than in the extracellular medium. Therefore, the K+ channels are important in stabilization of the membrane to a relatively polarized level and to oppose depolarization.

[0023] There are at least 8 major groups of K+ channels and are made up of combinations of dozens of subunits. The potassium channels permits the nerve cell to maintain electrochemical equilibrium in the face of a variety of constant activity, which accounts in large part for their diversity. Two broad classes can be defined by their transmembrane topology: those channel proteins having six transmembrane helices in each subunit and those having two transmembrane helices in each subunit.

Among the potassium channels having six transmembrane regions are included:
a) Voltage-gated potassium channels (Kvα and Kvβ)—ion channels that, like the voltage gated Na+ channel, open or close in response to changes in the transmembrane voltage. The Kvα proteins of the voltage gated K+ channels have 6 transmembrane regions, termed S1-S6 in each subunit. Four Kvα subunits surround a central pore channel, involving the S5 and S6 region of each subunit. The selectivity filter (or P region) comprises a hydrophobic amino acid sequence between the last two transmembrane regions and contains the sequence Gly-Tyr-Gly. The voltage sensor region includes multiple positively charged amino acids in the S4 transmembrane region.
b) Calcium-activated potassium channels (SK and Slo subunit families), which open in response to the presence of calcium ions or other signaling molecules. As with the voltage-gated potassium channels, the calcium activated potassium channels have 6 transmembrane regions, termed S1-S6 in each subunit. Four subunits surround a central pore channel, involving the S5 and S6 region of each subunit. The selectivity filter (or P region) comprises a hydrophobic amino acid sequence between the last two transmembrane regions and contains the sequence Gly-Tyr-Gly.
Potassium channels having two transmembrane region-containing subunits include:
a) Inwardly rectifying potassium channels (Kᵢᵣ); These channels may be open at all membrane potentials, but favor the influx, rather than the efflux of K+ ions. Among Kir channels, each subunit has two transmembrane regions. The channel protein is a tetramer of four subunits surround a single pore. As with the voltage-gated channel, each protein may be a homotetramer or a heterotetramer.
b) Tandem pore domain potassium channels (K2P), which are constitutively open or possess high basal activation, such as the “resting potassium channels” or “leak channels” that set the negative membrane potential of neurons. When open, they allow potassium ions to cross the membrane at a rate that is nearly as fast as their diffusion through bulk water. These channels have subunits that are tandem pairs of two K+ channel sequences (most K2P channels are made up of Kᵢᵣ-like amino acid sequences, but a few are known in which a Kv-type subunit and a Kᵢᵣ-type subunit are linked in tandem.

[0024] All K channels display a “signature sequence” between the two most carboxy-terminal transmembrane helices, which reads (from amino to carboxy terminus) with minor variations, TMxTVGYG (SEQ ID NO: 18) wherein x is any amino acid.

[0025] Alpha subunits form the actual conductance pore of the potassium channel. Based on sequence homology of the hydrophobic transmembrane cores, the alpha subunits of voltage-gated potassium channels have been grouped into 12 classes labeled Kv1-Kv12. The following is a non-exclusive list of 40 known human voltage-gated potassium channel alpha subunits grouped first according to function and then subgrouped according to the Kv sequence homology classification scheme, where the SEQ ID Nos are given in pairs with the odd numbered SEQ ID Nos comprising the nucleotide sequence, and the even numbered SEQ ID Nos comprising the protein sequence for that subunit (except for SEQ ID NOs 113-117, which are as indicated). Gene names are given in parentheses next to the GenBank Accession numbers):

### Delayed Rectifier

[0026] Non-Inactivating

Kvα1.x—Shaker-related:

[0027] Kv1.1 (KCNA1)(GenBank Accession No L02750 (SEQ ID NOS 19-20)),

[0028] Kv1.2 (KCNA2), (GenBank Accession No L02752 (SEQ ID NOS 21-22))

[0029] Kv1.3 (KCNA3), (GenBank Accession No L23499 (SEQ ID NOS 23-24))

[0030] Kv1.4 (KCNA4), (GenBank Accession No M55514 (SEQ ID NOS 25-26))

[0031] Kv1.5 (KCNA5), (GenBank Accession No M83254 (SEQ ID NOS 27-28))

[0032] Kv1.6 (KCNA6), (GenBank Accession No X17622 (SEQ ID NOS 29-30))

[0033] Kv1.7 (KCNA7), (GenBank Accession No AF315818 (SEQ ID NOS 31-32))

[0034] Kv1.8 (KCNA10) (GenBank Accession No U96110 (SEQ ID NOS 33-34))

Kvα2.x—Shab-related:

[0035] Kv2.1 (KCNB1), (GenBank Accession No. AF026005 (SEQ ID NOS 35-36))

[0036] Kv2.2 (KCNB2) (GenBank Accession No. U69962 (SEQ ID NOS 37-38))

Kvα3.x—Shaw-related:

[0037] Kv3.1 (KCNC1), (GenBank Accession No M96747 (SEQ ID NOS 39-40))

[0038] Kv3.2 (KCNC2) (GenBank Accession No AF268896 (SEQ ID NOS 41-42))

### Kvα7.x:

[0039] Kv7.1; KvLQT1 (KCNQ1)(GenBank Accession No AF000571 (SEQ ID NOS 43-44))

[0040] Kv7.2 (KCNQ2), (GenBank Accession No AF268896 (SEQ ID NOS 41-42))

[0041] Kv7.3 (KCNQ3), (GenBank Accession No AB208890 (SEQ ID NOS 45-46))

[0042] Kv7.4 (KCNQ4), (GenBank Accession No AF105202 (SEQ ID NOS 47-48))

[0043] Kv7.5 (KCNQ5) (GenBank Accession No AF202977 (SEQ ID NOS 49-50))

### Kvα10.x:

[0044] Kv10.1 (KCNH1) (GenBank Accession No AJ001366 (SEQ ID NOS 51-52))

### A-Type Potassium Channel

[0045] Rapidly Inactivating

Kvα3.x—Shaw-related:

[0046] Kv3.3 (KCNC3), (GenBank Accession No AB208930 (SEQ ID NOS 53-54))

[0047] Kv3.4 (KCNC4), (GenBank Accession No BC101769 (SEQ ID NOS 55-56))

Kvα4.x—Shal-related:

[0048] Kv4.1 (KCND1), (GenBank Accession No AF166003 (SEQ ID NOS 57-58))

[0049] Kv4.2 (KCND2), (GenBank Accession No AJ010969 (SEQ ID NOS 59-60))

[0050] Kv4.3 (KCND3), (GenBank Accession No AF048713 (SEQ ID NOS 61-62))

### Outward-Rectifying

### Kvα10.x:

[0051] Kv10.2 (KCNH5) (GenBank Accession No AF472412 (SEQ ID NOS 125-126))

### Inward-Rectifying

[0052] Kvα11.x—ether-a-go-go potassium channels:

[0053] Kv11.1 (KCNH2)—hERG, (GenBank Accession No U04270 (SEQ ID NOS 63-64))

[0054] Kv11.2 (KCNH6), (GenBank Accession No AF311913 (SEQ ID NOS 65-66))

[0055] Kv11.3 (KCNH7) (GenBank Accession No AF032897 (SEQ ID NOS 67-68))

### Slowly Activating

### Kvα12.x:

[0056] Kv12.1 (KCNH8), (GenBank Accession No AY053503 (SEQ ID NOS 69-70))

[0057] Kv12.2 (KCNH3), (GenBank Accession No AB022696 (SEQ ID NOS 71-72))

[0058] Kv12.3 (KCNH4) (GenBank Accession No AB022698 (SEQ ID NOS 73-74))

### Modifier/Silencer

[0059] Unable to form functional channels as homotetramers but instead heterotetramerize with Kvα2 family members to form conductive channels.

### Kvα5.x:

[0060] Kv5.1 (KCNF1) (GenBank Accession No AF033382 (SEQ ID NOS 75-76))

### Kvα6.x:

[0061] Kv6.1 (KCNG1), (GenBank Accession No AF033383 (SEQ ID NOS 77-78))

[0062] Kv6.2 (KCNG2), (GenBank Accession No AJ011021 (SEQ ID NOS 79-80))

[0063] Kv6.3 (KCNG3), (GenBank Accession No AB070604 (SEQ ID NOS 81-82))

[0064] Kv6.4 (KCNG4) (GenBank Accession No AF348984 (SEQ ID NOS 83-84))

### Kvα8.x:

[0065] Kv8.1 (KCNV1), (GenBank Accession No AF167082 (SEQ ID NOS 85-86))

[0066] Kv8.2 (KCNV2) (GenBank Accession No AF348983 (SEQ ID NOS 87-88))

### Kvα9.x:

[0067] Kv9.1 (KCNS1), (GenBank Accession No AF043473 (SEQ ID NOS 89-90))

[0068] Kv9.2 (KCNS2), (GenBank Accession No AB032970 (SEQ ID NOS 91-92))

[0069] Kv9.3 (KCNS3) (GenBank Accession No AF043472 (SEQ ID NOS 93-94))

### Beta Subunits

[0070] Beta subunits are auxiliary proteins which associate with alpha subunits in a α4β4 stoichiometry. These subunits do not conduct current on their own but rather modulate the activity of Kv channels.

### Kvβ1 (KCNAB1) GenBank Accession No U33428 (SEQ ID NOS 95-96))

[0071] * Kvβ2 (KCNAB2) GenBank Accession No U33429 (SEQ ID NOS 97-98))

[0072] * Kvβ3 (KCNAB3) GenBank Accession No AF016411 (SEQ ID NOS 99-100))

[0073] * minK (KCNE1) GenBank Accession No L28168 (SEQ ID NOS 101-102))

[0074] * MiRP1 (KCNE2) GenBank Accession No AF071002 (SEQ ID NOS 103-104))

[0075] * MiRP2 (KCNE3) GenBank Accession No AF076531 (SEQ ID NOS 105-106))

[0076] * MiRP3 (KCNE4) GenBank Accession No AY065987 (SEQ ID NOS 107-108))

[0077] * KCNE1-like (KCNE1L) GenBank Accession No AJ012743 (SEQ ID NOS 109-110))

[0078] * KCNIP1 (KCNIP1) GenBank Accession No AF199597 (SEQ ID NOS 111-112))

[0079] * KCNIP2 (KCNIP2) GenBank Accession No Q9NS61 (SEQ ID NOS 113) (this is solely the amino acid sequence)

[0080] * KCNIP3 (KCNIP3) GenBank Accession No AF199599 (SEQ ID NOS 114-115) (these are nucleotide and protein sequences, respectively)

[0081] * KCNIP4 (KCNIP4) GenBank Accession No AF453244 (SEQ ID NOS 116-117) (these are nucleotide and protein sequences, respectively).

Proteins minK and MiRP1 are putative hERG beta subunits.

[0082] Each and every patent, patent application, publication, website or database reference mentioned in this specification, including, without limitation, gene names, accession numbers and all information associated therewith, are hereby incorporated by reference herein in their entirety as part of this patent application.

### SUMMARY OF THE INVENTION

[0083] The present invention includes a general strategy and practical approach for the preparation of nucleic acid constructs and mutimeric single chain proteins using recombinant DNA methods. Expressed protein constructs comprise concatenated monomeric subunits linked in the same open reading frame and having pre-determined subunit position and stoichiometries.

[0084] In particular, methods of the present invention have the advantage of providing a “cassette” method for construction of substantially homogeneous preparations of specific multi-subunit proteins. These methods may involve the preparation of a bank or collection of nucleic acids encoding monomeric polypeptide subunits of the multimeric protein or family of multimeric proteins of interest. Each nucleic acid fragment encodes a monomeric polypeptide subunit and is altered to contain restriction endonuclease sites or “half sites” (i.e., sites containing either the 5′ or 3′ portions of a restriction endonuclease site) at its 5′ or 3′ terminus, thus permitting its assembly into a nucleic acid construct capable of expressing a specific multimeric protein of interest.

[0085] Multi-subunit proteins may be of interest in, for example, studying various proteins and protein complexes comprising polypeptide subunits. Additionally, such proteins may be used as targets for the screening of potential therapeutic agents.

[0086] Non-limiting examples of such proteins and protein complexes may comprise: Kᵥ voltage-activated K⁺ channels, calcium activated potassium channels, ATP-sensitive K⁺ channels, inward-rectified K⁺ channels, ligand-gated ion channels, such as the superfamily of ionotropic Cys-loop receptors (including cationic receptors such as the nicotinic acetycholine receptor, the 5HT₃ receptor and the serotonin receptor, and anionic receptors such as the glycine receptor, the GABA_{A} and GABA_{B} receptors), glutamate receptors, such as the NMDA (N-methyl-D-aspartate receptor, the AMPA (α-amino-3-hydroxy-5-methyl-4-isoxazole priopionic acid) receptors and the kainate receptors, ATP-gated receptors containing P2X₁-P2X₆ subunits.

[0087] Also included within the scope of the invention are methods involving the preparation of a bank or collection of nucleic acids encoding monomeric polypeptide subunits of the multimeric protein or family of multimeric proteins of interest, wherein each nucleic acid fragment encodes a monomeric polypeptide subunit and is altered to contain restriction endonuclease sites or “half sites” (i.e., sites containing either the 5′ or 3′ portions of a restriction endonuclease site) at its 5′ or 3′ terminus. According to this method, the identity of the restriction endonuclease sites at the 3′ and 5′ terminus of a given nucleic acid fragment is different depending upon the desired position of the polypeptide subunit in the concatenated multi-subunit protein. Thus, a nucleic acid encoding a given polypeptide subunit may be altered to have different pairs of restriction endonuclease sites or half sites for each desired position in the multimeric protein. Very preferably these sites do not occur within the coding sequence of the nucleic acid fragment.

[0088] Thus, also included within the scope of the present invention is a method for the preparation of a nucleic acid expression system for the production of proteins encoding two or more distinct amino acid sequences, whose position within the protein is dictated by a distinct pair of restriction endonuclease sites (or half sites) at the 5′ and 3′ termini.

[0089] Also included in the present invention is a method for the preparation of a single chain polypeptide comprising a mammalian ion channel selected from the group consisting of a sodium ion channel, a calcium ion channel and a potassium ion channel, wherein the ion channel comprises two or more subunits. Preferably the ion channel is a human ion channel. The invention also includes nucleic acid constructs for the expression of multimeric proteins comprising two or more ion channel subunits, and cells expressing such multi-subunit proteins.

[0090] The invention also includes method for the preparation of nucleic acid expression systems, and the nucleic acid expression system itself, containing nucleic acids encoding a concatenated multimeric protein comprising at least one mammalian Kv voltage-activated potassium channel subunit from a potassium channel family selected from the group consisting of Kvα1, Kvα2, Kvα3, Kvα4, Kvα5, Kvα6, Kvα7, Kvα8, Kvα9, Kvα10, Kvα11 and Kv12. In particular, the subunit may be selected from the group consisting of Kv1.1, Kv1.2, Kv1.3, Kv1.4, Kv1.5, Kv1.6, Kv1.7, Kv1.8, Kv2.1, Kv2.2, Kv3.1, Kv3.2, Kv3.3, Kv3.4, Kv4.1, Kv4.2, Kv4.3, Kv5.1, Kv6.1, Kv6.2, Kv6.3, Kv6.4, Kv7.1, Kv7.2, Kv7.3, Kv7.4, Kv7.5, Kv8.1, Kv8.2, Kv9.1, Kv9.2, Kv9.3, Kv10.1, Kv10.2, Kv11.1, Kv11.2, Kv11.3, Kv12.1, Kv12.2, and Kv12.3. In a preferred embodiment the amino acid sequence of the potassium channel subunit is from 74% homologous to 100% homologous, or at least 75%, or at least 80%, or at least 85%, or at least 90%, or at least 95%, or at least 98% or at least 99% homologous to a human potassium channel subunit. It will be understood that the range of homology from 75% homologous to 100% homologous specifically discloses, and is intended to specifically disclose, each and every degree of homology, expressed as an integer or a fraction, within this range.

[0091] By “amino acid sequence homology” is meant the degree of similarity of contiguous amino acid sequences in two designated regions of one or more protein or polypeptide molecules when the sequences are compared.

[0092] By “nucleotide sequence homology” is meant the degree of similarity of contiguous nucleotide sequences in two designated regions of one or more nucleic acid molecules when the sequences are compared.

[0093] Preferably, the method for the preparation of nucleic acid expression systems, and the nucleic acid expression system itself, containing nucleic acids encoding a concatenated multimeric protein comprising at least one mammalian Kv voltage-activated potassium channel subunits independently selected from the group consisting of Kv1.1, Kv1.2, Kv1.3, Kv1.4, Kv1.5, Kv1.6, Kv1.7, and Kv1.8 potassium channel subunits. The amino acid sequence of at least one mammalian Kv voltage-activated potassium channel subunit is preferably from 75% to 100% homologous to the human amino acid sequence of the analogous potassium channel subunit. Similarly, the nucleic acid sequence encoding at least one mammalian Kv voltage-activated potassium channel subunit is preferably from 75% to 100% homologous to the nucleic acid sequence of the counterpart human potassium channel subunit. It will be understood that the range of homology from 75% homologous to 100% homologous specifically discloses, and is intended to specifically disclose, each and every degree of homology, expressed as an integer or a fraction, within this range.

[0094] Preferably, although not invariably, at least 2 or at least 3 or at least 4 subunits of said multimeric protein are independently selected from the group consisting of Kv1.1, Kv1.2, Kv1.3, Kv1.4, Kv1.5, Kv1.6, Kv1.7, and Kv1.8 potassium channel subunits.

[0095] The present invention also includes methods of identifying a modulator of a multimeric protein of defined structure comprising producing a substantially homogenous preparation of a multimeric protein having a predetermined identity and order of monomer subunits and a detectable biological activity, contacting said multimeric protein with a test compound, detecting the biological activity of the multimeric protein, if any, and comparing the biological activity of the multimeric protein in the presence and absence of said test compound, wherein a difference in the biological activity of the multimeric protein in the presence and absence of the test compound indicates that the test compound is a modulator of said multimeric protein.

[0096] The present invention also includes methods of identifying and assigning molecular structures to native potassium channels comprising producing substantially homogenous preparations of various multimeric proteins having predetermined molecular structure and order of monomer subunits and a set of defined biological and biophysical properties, including for example and without limitation, sensitivity or lack thereof to test compounds, degree of sensitivity to test compounds, determining biological and biophysical properties of native potassium channels, comparing the biological and biophysical properties of the multimeric proteins of predetermined molecular structure and order of monomer subunits and those of the native potassium channels, wherein similarities in the biological properties of native potassium channels and multimeric proteins predetermined molecular structure and order of monomer subunits indicates similarities in molecular structures.

[0097] It will be understood that by “biological activity” is meant a test of, for example, a change in protein conformation, a change in the enzymatic activity of the protein, a change in chemical reactivity of the protein, a change in permeability of a cell membrane into which the protein is integrated, a change in conductance of electrical charge, a change in ligand binding characteristics and the like, conducted either in vivo or in vitro.

[0098] A “test compound” may be a discrete molecule or macromolecule, be a part of a larger molecule or group of molecules, or comprise a complex of molecules.

[0099] The invention also includes automated methods for carrying out the identification of a modulator of a multimeric protein of defined structure as described above wherein the contacting and comparing steps are performed using a computerized systems, such as a robotic system, in which a plurality of test compounds are contacted, either separately or in pools, with the multimeric protein. In such a system the detection of the biological activity of the multimeric protein (in the presence or absence of a test compound) or lack thereof and/or comparison steps are stored in a computer.

[0100] Preferably, but not exclusively, the multimeric protein of defined structure may be tested for ion channel activity, such as, without limitation, sodium, calcium or potassium channel activation or deactivation activity, conductance, kinetics of conductance, toxin inactivation susceptibility, and the like. In another test of biological activity, the multimeric protein of defined structure may be tested for ligand binding avidity, phosphorylation/dephosphorylation reactions, other enzymatic activities, or conformational changes such as those associated with cell surface receptors.

[0101] Compounds having a modulating activity on the biological activities of such multimeric proteins may include agonists, inverse agonists and/or antagonists of the naturally occurring version of the multimeric protein. An agonist stimulates the tested biological activity of the multimeric protein and an antagonist reduces or blocks the tested biological activity of the multimeric protein. An inverse agonist actually causes a reduction in the biological activity of the multimeric protein beyond that seen in the presence of an efficient antagonist or “blocker”. In other words, the inverse agonist is capable of stimulating an activity counter to that of the tested biological activity of the multimeric protein in the absence of the test compound.

[0102] Consistent with the present invention, a nucleic acid expression system for the expression of a multimeric protein may be made by first constructing a bank or collection of nucleic acid fragments encoding one or more subunits of a multimeric protein. The nucleic acid fragments are altered to contain recognition sites (or half sites) for different restriction endonucleases, one at or near (but preferably not within) the 5′ terminus of the coding sequence, and one at or near (but preferably not within) the 3′ termini of the coding sequence. The identity of the restriction sites determine the position of the subunit in the expressed multimeric protein.

[0103] An example of a restriction endonuclease recognition site is the nucleotide sequence recognized by the restriction endonuclease Eco RI. Upon cleavage, a 3′ (by convention referring to the strand written left to right from 5′ to 3′) terminus is created having a 5′ overhang, and a 5′ terminus is also created having a 5′ overhang. The portions of a restriction endonuclease recognition sequence remaining on the 5′ and 3′ termini following cleavage are referred to herein as “half sites”.

[0104] It will therefore be apparent that when a restriction endonuclease half site is located at the 5′ terminus of a nucleic acid fragment, the half site will be the portion of the recognition sequence located to the 3′ side of the position of endonuclease cleavage, whereas a half site located at the 3′ terminus of a nucleic acid fragment will be the portion of the recognition sequence located to the 5′ side of the cleavage point.

[0105] Thus, a 3′ half site of a given restriction endonuclease may be ligated to a 5′ half site for the same restriction endonuclease (or one leaving identical overhanging ends) and the resulting ligated nucleic acid will contain a regenerated recognition sequence, which may subsequently be cleaved upon exposure to the restriction endonuclease.

[0106] In the present invention, nucleic acid fragments encoding monomer subunits are very preferably altered to contain nucleotide sequences such that a pair of recognition sites (or half sites) for different restriction endonucleases is generated; one at or near (but preferably not within) the 5′ terminus of the coding sequence, and one at or near (but preferably not within) the 3′ terminus of the coding sequence. Preferably, the identities of the restriction sites or half sites is assigned on the basis of the desired position of the monomer subunit within the multimeric protein.

[0107] As a result, it may be desirable for each nucleic acid fragment encoding a given monomer subunit to contain a different pair of restriction sites or half sites for each monomer position in the multimeric protein. Also, the identity of the restriction sites or half sites preferably correspond to the defined position for each monomer in the resulting multimeric protein. Thus, the specific pair of restriction endonuclease sites or half sites at the 5′ and 3′ termini of all monomeric subunit-encoding nucleic acid fragments will preferably be the same for each desired monomer position in the resulting multimeric protein.

### BRIEF DESCRIPTION OF THE DRAWINGS

[0108] FIG. 1 is a schematic representation of the construction of an expression vector comprising four distinct nucleic acid fragments flanked by restriction sites for the expression of multimeric proteins. Also shown are the subunit position numbers in the multimeric protein.

[0109] FIG. 2A is an agarose gel electrophoretogram of intermediate Kv1.1 constructs to verify the assembly of the subunit monomers in the desired position of the expression vector.

[0110] FIG. 2B is an agarose gel electrophoretogram showing the result of restriction digests of the Kv1.1(#1)-Kv1.1(#2)-Kv1.2(#3)-Kv1.2(#4)-pIRES2-EGFP plasmid.

[0111] FIG. 3 shows the result of a Western blot of the expression products of plasmids Kv1.2(#4)-pIRES2-EGFP, Kv1.2(#3)-Kv1.2(#4)-pIRES2-EGFP, Kv1.1(#3)-Kv1.2(#4)-pIRES2-EGFP, Kv1.1(#2)-Kv1.2(#3)-Kv1.2(#4)-pIRES2-EGFP, and Kv1.1(#1)-Kv1.1(#2)-Kv1.2(#3)-Kv1.2(#4)-pIRES2-EGFP.

[0112] FIG. 4A shows the results of an assay in which the Kv1.1-1.1-1.2-1.2 tetramer channel is expressed in cells and displayed on membranes to form fully functional potassium channels. Shown is affinity binding of radiolabled DTX, an inhibitor of Kv1.x channel.

[0113] FIG. 4B shows the results of a competition binding assay in which the Kv1.1-1.1-1.2-1.2 tetramer channel is expressed in cells and displayed on membranes to form fully functional potassium channels. The membranes are inculbated with 2.5 μM 125I-αDTX and various concentrations of the indicated toxins αDTX (closed circle), DTXₖ (open circle), or TsTx (tityustoxin-Kₐ). The figure shows the relative strengths of specific binding.

[0114] FIG. 4C shows the results of a competition binding assay in which the Kv1.1-1.1-1.2-1.2 tetramer channel is expressed in cells and displayed on membranes to form fully functional potassium channels. The membranes are inculbated with 2.5 μM ¹²⁵I-αDTX and various concentrations of ShK and its derivative ShK-Dap²². The figure shows the relative strengths of specific binding.

[0115] FIG. 5 shows immunoblots of lysates from HEK 293 cells transfected with plasmids expressing the indicated tetramer constructs. FIG. 6 shows a Western blot of a preparation of intact HEK 293 cells expressing tetramers Kv 1.1-1.1-1.2-1.2, 1.1-1.2-1.1-1.2, 1.2-1.2-1.1-1.1 and 1.2-1.1-1.2-1.1.

[0116] FIGS. 7A and 7B is an agarose gel electrophoretogram showing the result of restriction digests of the (a) Kv1.1(#1)-Kv1.1(#2)-Kv1.2(#3)-Kv1.2(#4)-pIRES2-EGFP plasmid; (b) Kv1.1(#1)-Kv1.2(#2)-Kv1.1(#3)-Kv1.2(#4)-pIRES2-EGFP plasmid; (c) Kv1.2(#1)-Kv1.2(#2)-Kv1.1(#3)-Kv1.1(#4)-pIRES2-EGFP plasmid; and (d) Kv1.2(#1)-Kv1.1(#2)-Kv1.2(#3)-Kv1.1(#4)-pIRES2-EGFP plasmid.

[0117] FIG. 8 shows fluorescent micrographs depicting surface expression patterns in transfected COS-7 cells expressing fully functional hetero-tetrameric Kv1 channels.

[0118] FIGS. 9 and 10 show whole-cell voltage-clamped recordings of concatenated Kv1 heteromers Kv 1.1-1.1-1.2-1.2, 1.4-1.6-1.1-1.2 and 1.4-1.6-1.3-1.2 in corresponding HEK-293 transfected cells and the sensitivities of the potassium channel currents mediated by Kv 1.1-1.1-1.2-1.2 Kv 1.4-1.6-1.1-1.2 and Kv1.4-1.6-1.3-1.2 to TEA, αDTX, DTXₖ, 4-aminopyridine (4AP), TsTX and ShK-Dap²².

[0119] FIGS. 11 and 12 show whole-cell voltage-clamped recordings of HEK 293 transfected with concatenated Kv1 heteromers Kv 1.1-1.1-1.2-1.2, 1.4-1.6-1.1-1.2 and 1.4-1.6-1.3-1.2 and the sensitivities of the potassium channel currents mediated by these concatamers to TEA and/or AGTX1 and TsTX-Kα.

[0120] FIG. 13 is a non-exclusive illustration of a scheme according to the present invention showing a generalized cassette method for the construction of a desired polymeric protein of defined subunit order.

### DETAILED DESCRIPTION OF THE INVENTION

[0121] The present invention includes a general strategy and practical approach for the preparation of nucleic acid constructs and multimeric single chain proteins using recombinant DNA methods. Expressed protein constructs comprise concatenated monomeric subunits linked in the same open reading frame and having pre-determined subunit position and stoichiometries.

[0122] In various embodiments of the methods, systems and compositions of the invention an important feature includes a bank or collection of one or more monomer nucleic acid species with each such nucleic acid species encoding a protein monomer subunit species and divided into separate subspecies each bearing a distinct pair of position-specific subcloning restriction endonuclease recognition sites. The subcloning restriction endonuclease recognition sites are introduced by joining the 5′ and 3′ ends of each nucleic acid subspecies with a position-specific designated nucleic acid linker pair. The position-specific designated nucleic acid linker pairs joined to the subspecies of each nucleic acid species are the same for each desired position of the protein monomer subunit species in an expressed protein polymer. Thus, there will be as many designated linker pairs as monomer units in the expressed protein polymer. The set of position-specific linkers for construction of a given polymer is referred to herein as a “linker set”.

[0123] Each linker pair is structured to comprise a 5′ designated linker having a 5′ subcloning restriction endonuclease recognition site different from that of the 5′ designated linker of any other designated linker pair of the linker set; and a 3′ designated linker having a 3′ subcloning restriction endonuclease recognition site different from that of any other 3′ designated linker of any other designated linker pair of the linker set.

[0124] Linkers (including primers) preferably contain a Xenpus β globin UTR region to aid in expression of the polymeric protein.

[0125] Furthermore, each linker set is structured so that the 3′ subcloning restriction endonuclease recognition site of the first designated linker pair (the linker pair designating “Position 1” of the expressed protein) is the same as the 5′ subcloning restriction endonuclease recognition site of the second designated linker pair and the 3′ subcloning restriction endonuclease recognition site of the second designated linker pair (the linker pair designating “Position 2” of the expressed protein) is the same as the 5′ subcloning restriction endonuclease recognition site of the third designated linker pair, and so forth.

[0126] Cleavage of the linker pairs with the appropriate restriction endonuclease results in the corresponding “half sites” on each end of the nucleic acid subspecies, available to anneal with other nucleic acids appropriately cleaved with the same or isoschizomeric restriction endonucleases. The resulting nucleic acid constructs are “position-specific” nucleic acid subspecies.

[0127] When constructing expression vectors for the expression of a desired polymeric protein, the appropriate position specific nucleic acid subspecies for each position of the desired polymeric protein are annealed, joined, and subcloned into an appropriate cloning site of an expression vector. The vector is then introduced into a suitable host cell to produce a polymeric protein comprising a defined order of specific monomer subunits.

[0128] Thus, in one embodiment the present invention is drawn to a collection of nucleic acids comprising one or more nucleic acid monomer subunit species separately joined to each of first, second, third and fourth designated nucleic acid linker pairs of to make first, second, third, and fourth nucleic acid monomer subunit subspecies, wherein each designated nucleic acid linker pair comprises a 3′ subcloning restriction endonuclease recognition site and a 5′ subcloning restriction endonuclease recognition site, wherein;

[0129] a) the 3′ subcloning restriction endonuclease recognition site of the first designated linker pair is the same as the 5′ subcloning restriction endonuclease recognition site of the second designated linker pair;

[0130] b) the 3′ subcloning restriction endonuclease recognition site of the second designated linker pair is the same as the 5′ subcloning restriction endonuclease recognition site of the third designated linker pair;

[0131] c) the 3′ subcloning restriction endonuclease recognition site of the third designated linker pair is the same as the 5′ subcloning restriction endonuclease recognition site of the fourth designated linker pair; and wherein the first, second, third, and fourth nucleic acid monomer subunit subspecies are structured to maintain a common open reading frame when ligated together in the sequence, in the direction from 5′ to 3′, first, second, third, and fourth nucleic acid monomer subunit subspecies.

[0132] Those of skill in the art recognize that the polymeric proteins of the present invention (and thus nucleic acid cassettes encoding them) need not be limited to tetrameric proteins or corresponding cassettes, but can be comprised of as many subunits as there are position-specific linker pairs in the linker set. By “linker” is also included PCR primers that are incorporated within an amplicon.

[0133] In another embodiment the invention is drawn to a method of making a polymeric protein having a N-terminus and a C-terminus and a defined order of specific monomer subunits covalently linked, comprising:

[0134] a) amplifying one or more monomer nucleic acid species encoding a monomer subunit species to be contained in the polymeric protein;

[0135] b) creating a linker set comprising first, second, third and fourth designated nucleic acid linker pairs; wherein
[0136] 1) each designated linker pair comprises a 5′ designated linker having a 5′ subcloning restriction endonuclease recognition site different from that of the 5′ designated linker of any other designated linker pair of said linker set;
[0137] 2) a 3′ designated linker having a 3′ subcloning restriction endonuclease recognition site different from that of any other 3′ designated linker of any other designated linker pair of said linker set;
[0138] 3) wherein each of the first, second, third, and fourth designated linker pairs is structured to correlate with a first, second, third, and fourth monomer subunit position, respectively, in the tetrameric protein; and
[0139] 4) wherein
   [0140] A) the 3′ subcloning restriction endonuclease recognition site of the first designated linker pair is the same as the 5′ subcloning restriction endonuclease recognition site of the second designated linker pair;
   [0141] B) the 3′ subcloning restriction endonuclease recognition site of the second designated linker pair is the same as the 5′ subcloning restriction endonuclease recognition site of the third designated linker pair;
   [0142] C) the 3′ subcloning restriction endonuclease recognition site of the third designated linker pair is the same as the 5′ subcloning restriction endonuclease recognition site of the fourth designated linker pair; and

[0143] c) individually joining amplified monomer nucleic acid species to 3′ and 5′ designated linkers of each of the first, second, third and fourth designated linker pairs to form a bank of first, second, third, and fourth in-frame nucleic acid monomer species constructs encoding a specific monomer subunit, each said construct having designated restriction site pairs at its 3′ and 5′ end correlating to one of four positions within the polymeric protein,

[0144] d) selecting a first, second, third, and fourth nucleic acid monomer species construct encoding the desired monomer subunit for each such position of the polymeric protein,

[0145] e) subcloning said first, second, third and fourth nucleic acid monomer species constructs into an expression vector having, in the 5′ to 3′ direction, restriction sites for joining with the 5′ restriction site of each of the first, second, third and fourth nucleic acid monomer species constructs, and a 3′ restriction site for joining with the 3′ end of the fourth nucleic acid monomer species construct, wherein the expression vector is structured to insert each nucleic acid monomer species construct in a common open reading frame, and

[0146] f) inserting said expression vector within a suitable host cell,

[0147] g) expressing within said host a polypeptide comprising a polymeric protein comprising a defined order of specific monomer subunits.

[0148] Again, those of ordinary skill will recognize immediately that this method need not be limited to methods of making tetrameric proteins, but can be applied to the synthesis of proteins comprised of as many subunits as there are position-specific linker pairs in the linker set. By “linker” is also included PCR primers that are incorporated within a nucleic acid amplicon.

[0149] In yet another embodiment the invention includes a kit comprising a cassette cloning system for the expression of a concatenated multisubunit protein comprising;

[0150] a) a nucleic acid expression vector comprising a multiple cloning site having at least a first restriction nuclease recognition site and a second different nucleic acid recognition site located to the 3′ of the first site; and

[0151] b) a nucleic acid collection comprising one or more nucleic acid monomer subunit species separately joined to each of first, second, third and fourth designated nucleic acid linker pairs of to make first, second, third, and fourth nucleic acid monomer subunit subspecies, wherein each designated nucleic acid linker pair comprises a 3′ subcloning restriction endonuclease recognition site and a 5′ subcloning restriction endonuclease recognition site, wherein;

[0152] a) the 3′ subcloning restriction endonuclease recognition site of the first designated linker pair is the same as the 5′ subcloning restriction endonuclease recognition site of the second designated linker pair;

[0153] b) the 3′ subcloning restriction endonuclease recognition site of the second designated linker pair is the same as the 5′ subcloning restriction endonuclease recognition site of the third designated linker pair;

[0154] c) the 3′ subcloning restriction endonuclease recognition site of the third designated linker pair is the same as the 5′ subcloning restriction endonuclease recognition site of the fourth designated linker pair; and wherein the first, second, third, and fourth nucleic acid monomer subunit subspecies are structured to maintain a common open reading frame when ligated together in the sequence, in the direction from 5′ to 3′, first, second, third, and fourth nucleic acid monomer subunit subspecies,

[0155] wherein the 5′ subcloning restriction endonuclease recognition site of one nucleic acid monomer subunit subspecies is the same as the first vector restriction endonuclease recognition site, and the 3′ subcloning restriction endonuclease recognition site of another nucleic acid monomer subunit subspecies is the same as the second vector restriction endonuclease recognition site.

[0156] Those of skill in the art recognize that kits such as those described may have more of less subunit species than the four described above without departing from the scope of the invention.

[0157] The invention also includes nucleic acid constructs for the expression of substantially homogeneous preparations of recombinant multimeric proteins of predetermined structure. By this is meant that the preparations preferably contain less than about 20% or 15% or 10% or 5% by weight of any multimeric protein made from one or more of the same monomer subunits, which protein has an amino acid sequence different from the sequence recombinant multimeric protein. Thus, a substantially homogeneous preparation of a given multimeric protein may include a cell lysate, an in vitro translation reaction mixture, chromatography fractions, (such as ion exchange, reverse phase, and gel exclusion fractions), and the like. Particularly useful is a cassette-based nucleic acid expression system for easily making any of a variety of different multimeric proteins using monomeric subunit-encoding nucleic acid fragments.

[0158] The invention is useful for creating any of a variety of monomer-based single chain polypeptides. Such polypeptides may be based, without limitation, upon 1) naturally occurring single chain multimeric proteins (such as the immunoglobulin heavy chains and light chains), 2) multimeric protein complexes in which monomer subunits naturally occur as single chains and associate into a quaternary structure, or 3) non-naturally occurring single chain multimeric proteins.

[0159] In certain embodiments the single chain multimeric polypeptides of the present invention aggregate or associate into a tertiary structure functionally similar to the quaternary structure of a naturally occurring multimeric protein complex made from the same or similar subunits.

[0160] The invention also includes methods of identifying a modulator of a biological activity possessed by a multimeric protein from a population of compounds, comprising contacting said multimeric protein with a compound under conditions sufficient to detect a change in a biological activity of the multimeric protein in the presence and the absence of the compound, and identifying a compound that causes such a change in said biological activity of said multimeric protein as a modulator of said biological activity.

[0161] The Examples that follow comprise specific embodiments of the present invention, which is, however, not limited only to the disclosure of these examples, but is defined solely by the claims that conclude this specification.

### EXAMPLES

[0162] To exemplify the present invention, a set of voltage-activated K⁺ channels were made. Voltage-activated K⁺ channels (Kv1) represent a diverse group of sialoglycoprotein complexes consisting of four transmembrane channel-forming α subunits and four cytoplasmically-associated auxiliary β proteins. Their numerous functions include control of neuronal excitability, shaping of action potentials, determining the inter-spike interval and indirectly, modulation of synaptic transmission. Expression of mutant Kv1.X monomeric subunits in vivo can result in severe neurological disorders such as episodic ataxia I and myokymia. Moreover, conditions like multiple sclerosis and Alzheimer's disease are accompanied by changes in the level of expression of Kv1.X channels. Therefore, it is of considerable importance to investigate the fundamental roles served by these channels; this requires recreation of heterologously-expressed complexes mimicking the composition and stoichiometry of their native counterparts.

[0163] The present examples illustrate the invention by employing two separate rounds of PCR-amplification of Kv1.X genes to generate the PCR-Blunt® plasmid-based bank of all individual Kv1.X monomeric constituents with pre-attached linker regions. Individual subunits from this bank can be directly inserted into pIRES2-EGFP plasmid which is used as an assembling platform for the preparation of any type of Kv1.X concatenated channel construct (outlined in FIG. 1).

[0164] In the first stage, PCR products of each individual monomeric Kv1.X gene were generated using Kv1.X-pAKS plasmids as templates and primers based on the 5′ and 3′ terminal coding sequences of the respective Kv1.X genes, with a Xba I flanking site for all forward primers and a Xho I site in all reverse primers. The presence of 5′ Xba 1 and 3′ Xho I restriction sites in Kv1.X PCR products permitted their cloning into the modified pβUT2 plasmid, digested identically. Modification of the original pβUT2 plasmid was performed to delete those sites which were also present in the pIRES2-EGFP plasmid, and which could therefore interfere with the construction methodology.

[0165] The second round of PCR-amplification attached identical half-size linker regions to the 5′ and 3′ ends of Kv1.X genes, with simultaneous introduction of flanking restriction sites specific for each assembly position in concatenated oligomers. In assembled oligomeric constructs, half-size linker regions on the left and right hand sides of two neighboring monomeric subunits formed a full-length linker, keeping those two Kv1.X-subunits in the same open reading frame (ORF). Kv1.X-pβUT2 plasmids prepared after the initial PCR were used as templates for the second round, together with primers based not on the sequence of individual Kv1.X-genes but on that of the untranslated regions (UTR) of Xenopus β-globin gene inserted into pβUT2 and flanking its Xba I and Xho I cloning sites. It was shown previously that these UTR regions can serve as a linker for joining two concatenated Kv1.X subunits.

[0166] Forward primers corresponded exactly to the last 30 nucleotides of the 5′ UTR up to Xba I cloning site; reverse primers were based on the 30-mer stretch of the 3′ UTR starting downwards from the Xho I cloning site. Since both primers were based on the sequence of UTRs, any type of gene placed between Xba I and Xho I cloning sites of pbUT2 could be amplified using the same pair of primers. Thus, all PCR-products of Kv1.X genes, prepared at this stage, consisted of the full gene sequence with flanking 30-mer pieces of 5′ UTR at their 5′ ends and 3′ UTR DNA at their 3′ ends. They were bluntly cloned into PCR-Blunt® plasmid which allowed creation of a bank of ready-to-use monomers for the assembling of any Kv1.X concatenated complex.

[0167] Either pIRES2-EGFP plasmid or pIRES-DsRed were chosen as an assembling platform for the following reasons. Firstly, they contain a sufficient number of cloning restriction sites which could easily accommodate all four channel α subunits, cloned independently one by one. Secondly, presence of either EGFP or DsRed makes these plasmids convenient for monitoring the transfection and expression, using fluorescent microscopy.

[0168] Four cloning positions of pIRES2-EGFP plasmid were utilised for assembling the oligomeric constructs. Position #1, corresponding to the first Kv1.X constituent in the resultant tetramer, was situated and utilized between Nhe I and Bgl II sites. Therefore, UTR-specific primers used for constructing the PCR products to be cloned into this position were flanked with Nhe I for forward and Bgl II for reverse primers, respectively. Cloning position #2, relating to the second constituent in the tetramer, resided between Bgl II and Eco RI sites; UTR-specific primers for this position were flanked with these two restriction sites. Cloning position #3, corresponding to the third constituent in the tetramer, was located between EcoR I and Sal I sites; these sites were employed for flanking forward and reverse primers, respectively, in the third group of UTR-specific primers. Finally, cloning position #4, containing the fourth situated constituent in the tetramer (and also containing a stop codon), was between Sal I and BamH I sites; forward primers in the fourth UTR-specific group of primers were flanked with Sal I and reverse with BamH I sites.

[0169] Thus, all four groups of UTR-specific primers, based on the same sequences of 5′-UTR for all forward and 3′-UTR for all reverse primers respectively, differed only by position-specific flanking restriction sites. This presence of unique restriction sites for each pair of primers made them actually “position-specific” rather than “subunit-specific”. Since each of the half-linkers consisted of 30 nucleotides and all restriction sites contained 6 nucleotides, every two neighbouring subunits in the assembled oligomers (regardless of their exact position) were separated by the 78-nucleotide stretches of linker regions (including 6 nucleotides for each Xba I and Xho I sites added in the first round of PCR) which kept all of them in the same ORF. Analysis of linker regions showed the presence of relatively low numbers of hydrophobic amino acids and the absence of internal stop codons.

[0170] Although the following examples demonstrate a method that begins the assembly of the multimeric expression construct with the fourth position, it is worth noting that assembling of concatenated oligomers can be started from any of the four cloning positions. Similarly, any constituent in the prepared oligomer can be excised and replaced with any other desirable Kv1.X nucleic acid monomer. In this case, assembly was started from the position #4.

[0171] Monomeric Kv1.X1 (+stop-codon) subunit inserted into position #4 itself represents a construct suitable for expression. Insertion of Kv1.X2 into position #2 transforms monomeric construct into expressible Kv1.X2-1.X1 dimer. Consecutive addition of monomers into positions #3 and #4 resulted in the creation of a full tetramer. Constructs prepared at each stage were verified by restriction digestion (See FIGS. 2A, 2B, 7A and 7B).

[0172] This kind of approach can be used generally for the preparation of any type of oligomeric proteins with desired pre-determined stoichiometry and composition. Proof of this versatile procedure is provided by the demonstrated successful expression in HEK 293 cells of Kv1.X channels containing three or four concatenated α subunits in different positional arrangements, as shown SDS-PAGE and Western blotting (FIG. 3). Channels containing Kv1.2, Kv1.1-1.2, Kv1.2-1.2 (FIG. 3), or any combination of subunits could be similarly obtained. (See e.g., FIG. 5). Importantly, these recombinant channels can be incorporated into the plasmalemma in fully-functional form; this was established from the saturable, high-affinity binding to the intact cells of a radiolabelled specific inhibitor of Kv1.X channels (FIG. 4), and confirmed by electrophysiological recording of voltage-activated K⁺ current.

[0173] Also, the functional properties of fully functional Kv1 recombinant channels Kv1.1-1.1-1.2-1.2, Kv1.1-1.2-1.1-1.2, Kv1.2-2.1-1.1-1.1, Kv1.2-1.1-1.2-1.1, Kv1.4-1.6-1.1-1.2 and Kv1.4-1.6-1.3-1.2 were examined by whole-cell, voltage-clamp, conventional recordings from HEK-293 cells transfected separately with each of the 6 constructs. The sensitivities of the potassium channel currents mediated by these tetramers to various channel blockers including tetraethylammonium (TEA), αDTX, DTXₖ, 4-aminopyridine (4AP), Agitoxinl (AgTX1), TsTX-Kα and ShK-Dap²² were determined. The K⁺ currents generated by these tetramers could be distinguished biophysically and by susceptibilities to inhibitors. The importance of α subunit arrangements within these tetramers in governing pharmacological differences and how oligomeric subtypes can be distinguished with appropriate blockers was established.

### Example 1

### Construction of Nucleic Acid Cassettes Encoding Kv1.1 and Kv1.2 Monomeric Subunits

[0174] Rat potassium channel Kv1.1 cDNA and Kv1.2 cDNA were provided separately in plasmid pAKS for use as PCR templates as described in Akhtar et al., J. Biol. Chem., 277:19, 16376-16382 (May 10, 2002). Similar techniques can be used for the cloning of human genes.

[0175] For the Kv1.1 subunit, the forward PCR primer has the nucleotide sequence:

(SEQ ID. NO: 118)
GTCTAGAATGACGGTGATGTCAGGGGAGAATGC,

wherein the underlined portion of SEQ ID NO: 118 indicates an Xba I restriction endonuclease site.

[0176] The reverse Kv1.1 PCR primer has the nucleotide sequence:

(SEQ ID NO: 119)
GCTCGAGAACATCGGTCAGGAGCTTGCTCTTATTAAC.

The underlined portion of SEQ ID NO: 119 indicates an Xba I restriction endonuclease site.

[0177] For the Kv1.2 subunit, the forward PCR primer has the nucleotide sequence

(SEQ ID. NO: 120)
GTCTAGAATGACAGTGGCTACCGGAGACCCAGTGG,

wherein the underlined portion of SEQ ID NO: 120 indicates an Xba I restriction endonuclease site.

[0178] The reverse Kv1.2 PCR primer has the nucleotide sequence:

(SEQ ID NO: 121)
GCTCGAGGACATCAGTTAACATTTTGGTAATATTCAC.

The underlined portion of SEQ ID NO: 121 indicates an Xba I restriction endonuclease site.

[0179] An equivalent version of this latter primer containing two in-frame (complementary or “antisense”) translational termination codons as well as the Xba I site has the nucleotide sequence:

(SEQ ID NO: 122)
GCTCGAGTTATCAGACATCAGTTAACATTTTGGTAATATTCAC

[0180] PCR amplification employing each of the Kv1.1 and Kv1.2 cDNAs were performed using standard methods and equipment as follows. The template DNA was denatured at 95° C. for 2 minutes, and amplification commenced using Taq polymerase in the presence of the indicated primer pairs for twenty two cycles of denaturation at 94° for 30 seconds, annealing at 58° C. for 45 seconds and elongation at 72° C. for 2 minutes.

[0181] PCR polymerization products were subjected to agarose gel electrophoresis. Gel slices were taken corresponding to bands having the expected molecular weight of nucleic acids encoding the full-length Kv subunit. These purified PCR products were cloned into PCR-blunt plasmid obtained from Invitrogen, Inc.; 5 μl purified PCR products containing approximately 100 ng DNA were mixed with 1 μl PCR-blunt plasmid and DNA ligase, and ligation was performed at 16° C. overnight.

[0182] The ligated DNA constructs were used to transform 50 μl aliquots of competent E. coli dh5a cells and positive clones selected on the basis of kanamycin resistance. Plasmid DNA was then isolated from larger cultures made from positive clones using a Midi-prep kit employing anion exchange column chromotography, purchased from Qiagen, Inc. and stored for future use.

[0183] In a similar fashion to that shown above for Kv1.1 and 1.2, Xho I and Xba I sites are introduced into each of the Kvα1.X remaining potassium channel subunits using PCR primer pairs. It is important that the number of nucleotides in the primer corresponding to the 3′ end of the insert be maintained so as to ensure that a spliced additional subunit, if any, be translated in frame.

[0184] For the preparation of subunit insert cassettes for the construction of expression vector encoding a multimeric protein, PCR-blunt DNA was digested simultaneously with Xho I and Xba I enzymes and excised inserts purified by agarose gel electrophoresis prior to use.

### Example 2

### Cloning of Kv1.X Inserts into Mutated pβUT2 Plasmid and Incorporation of 5′ and 3′ UTRs from Xenopus β-Globin

[0185] The multiple cloning site of plasmid pbUT2 was mutated as follows to destroy the Sal I, Bam H1 and Bgl II sites, thereby preventing interference with the MCS of pIRES2-EGFP (described in BD Biosceiences Clonetech Publication PR19951, published Oct. 3, 2002), which has similar sites.

[0186] In brief, pbUT2 plasmid was digested with Bgl II enzyme for 60 minutes at 37° C. The resulting 5′ Bgl II overhangs were filled using Klenow enzyme and dNTPs, and the resulting product was blunt-end ligated overnight using T4 ligase. BamH I and Sal I sites were destroyed in similar fashion in the DNA purified from positive clones.

[0187] Destruction of Sal I, Bam H1 and Bgl II sites in the resulting pbUT2 DNA was confirmed by restriction digestion of the triply-mutated DNA, with non-mutated pbUT2 serving as a control. Mutated pbUT2 was sequenced using bacteriophage T3- and T7-promoter specific primers, including the 5′- and 3′-untranslated regions (UTR) of Xenopus β-globin gene flanking the MCS in pbUT2. It has previously been shown that inclusion of these UTRs can enhance expression of potassium channel subunits in mammalian cells several-fold. See e.g., Linman et al., Neuron 9:861-871 (1992).

[0188] These nucleotide sequences were used to design primers for the second round of PCR. The above-noted purified Kv1.1- and 1.2-inserts (in Example 1) were ligated into mutated pbUT2 plasmid digested with Xba I and Xho I restriction endonucleases.

### Second Round of PCR-Amplification of Kv1.1- and 1.2 Genes.

[0189] The aim of the second round of PCR was to attach linker regions to each side of Kv1.X genes, with flanking restriction sites for their positional cloning into the master pIRES2-EGFP expression plasmid.

[0190] Forward and reverse primers used to incorporate Kv1.1- and 1.2-inserts were based on the nucleotide sequence of the 5′ and 3′ Xenopus b-globin untranslated regions (UTRs) of pbUT2 flanking the XbaI and XhoI sites of the MCS.

[0191] The annealing portions of the forward and reverse primers were:

| | |
|---|---|
| AGAATAAACGCTCAACTTTGGCAGATC,, | (SEQ ID NO: 123) |
| and | |
| CCAGATCCGGTACCAGATCGATCTCGAC. | (SEQ ID NO: 124) |

### Position 1 of the Tetramer

[0192] The unique Nhe I and Bgl II sites of the pIRES2-EGFP MCS were employed for insertion of the Kv1.X gene encoding the subunit occupying the first (N-terminal most) position of the four subunits comprising a Kv1.X tetramer, by incorporating the restriction endonuclease recognition sequence into the region flanking the annealing part of the UTR-specific forward and reverse primers, respectively. The Nhe I site is placed on the 5′ side of the sense primer, and the Bgl II site is placed on the 5′ side of the antisense primer.

### Position 2 of the Tetramer

[0193] Likewise, a Bgl II site (for incorporation on the 5′ side of the Kv1.x subunit gene) and an Eco RI site (for incorporation on the 3′ side of the Kv1.x subunit gene) is incorporated into the sense and antisense primers, respectively, for subunits engineered to occupy the second position of the tetrameric protein. Use of the corresponding sites of pIRES2-EGFP permit insertion of this cassette into the second position of the expression vector for making the tetrameric protein.

### Position 3 of the Tetramer

[0194] The third group of UTR-specific primers were flanked with Eco RI (forward “sense” primer) and Sal I sites (reverse “antisense” primer), respectively.

### Position 4 of the Tetramer

[0195] The fourth group of UTR-specific primers were flanked with Sal I (forward “sense” primer) and Bam H1 sites (reverse “antisense” primer), respectively. These sites provided the fourth (C terminal) subunit constituent of the tetrameric protein. For subunits intended to occupy this position, one or more translational stop codons are also incorporated into the 3′ end of the gene, as exemplified above.

[0196] In each case, PCR amplification was performed under the same conditions as described above for the first round of PCR amplification, with PCR products being purified by electrophoresis on agarose gel and cloned into PCR-blunt plasmid.

### Example 3

### Assembly of Kv1.X Tetramers of Specified Structure

[0197] In this Example, an expression vector for a specific tetramer having a Kv1.1 subunit in the first and second position, and a Kv1.2 subunit in the third and fourth position was made.

[0198] Tetrameric construct assembly began by incorporation of the Kv1.2 (+stop codon) insert for expression in the fourth position of tetramer. Kv.1.2 subunits containing a stop codon were excised from PCR-blunt DNA with Sal I and Bam HI enzymes, in parallel with digesting the pIRES2-EGFP plasmid with the same restrictases. These cleaved DNAs were then purified by electrophoresis on agarose gel. The purified vector and insert DNAs were then ligated together in the manner outlined above and used to transform DH5α cells. Positive transformant colonies of DH5α cells were used for DNA preparation of the plasmid containing the Kv1.2 (+stop) insert (termed Kv1.2 (#4)-pIRES-2-EGFP).

[0199] In the next step, the resultant Kv1.2 (#4)-pIRES-2-EGFP) DNA acted as the recipient for putting either a) the Kv1.2 (−stop codon) or b) Kv1.1 (−stop codon) inserts into the third position. To do this, the recipient plasmid DNA and the respective Kv1.1 or Kv1.2 PCR-blunt DNA were each digested with EcoRI and Sal I enzymes. Purification of the inserts and digested plasmid, ligation, DH5a cells transformation, and plasmid preparations were performed as before.

[0200] The same methodology used to prepare plasmid DNA with dimeric inserts spanning positions #3 and #4-Kv1.2 (#3)-1.2 (#4) and Kv1.1 (#3)-1.2 (#4) were used to clone Kv1.1(−stop)- or Kv1.2(−stop)-inserts respectively, into position #2 using Bgl II and Eco RI cloning sites.

[0201] Finally, completion of the tetramer assembly entailed insertion as before of Kv1.1 (−stop) into position #1 by digestion of insert and recipient plasmids with Nhe I+Bgl II. Recipient plasmids used for this stage of the construction were: Kv1.1(#2)-1.2(#3)-1.2(#4) and Kv1.2(#2)-1.1(#3)-1.2(#4).

[0202] FIG. 1 shows a schematic representation of the construction of Kv1.1(#1)-Kv1.1(#2)-Kv1.2(#3)-KV1.2(+S)(#4) pIRES2-EGFP.

[0203] FIG. 2A shows digestion and agarose gel electrophresis of intermediate Kv1.1 constructs to verify the assembly of the subunit monomers in the desired position of the expression vector. Thus Lane 1 of this figure shows Kv1.2(#4)-pIRES2-EGFP digested with Sal I and Bam H1.

[0204] Lane 2 shows digestion of Kv1.2(#3)-Kv1.2(#4)-pIRES2-EGFP with Sal I and Eco RI to remove only the insert in the third position. Lane 3 shows digestion of Kv1.2(#3)-Kv1.2(#4)-pIRES2-EGFP with Eco RI and Bam HI to remove a single dimeric insert.

[0205] Lane 4 shows digestion of Kv1.1(#2)-Kv1.2(#3)-Kv1.2(#4)-pIRES2-EGFP with Bgl II and Eco RI to remove the Kv1.1-encoding insert. Lane 5 shows digestion of Kv1.1(#2)-Kv1.2(#3)-Kv1.2(#4)-pIRES2-EGFP with Bgl II and Bam H1 to remove the trimeric Kv1.1-Kv1.2(#3)-Kv1.2(#4) insert.

[0206] Lane 6 shows digestion of Kv1.1(#1)-Kv1.1(#2)-Kv1.2(#3)-Kv1.2(#4)-pIRES2-EGFP with Bgl II and Nhe I to remove the Kv1.1(#1)-encoding insert. Lane 7 shows digestion of Kv1.1(#1)-Kv1.1(#2)-Kv1.2(#3)-Kv1.2(#4)-pIRES2-EGFP with Bam H1 and Nhe I to remove the entire Kv1.1(#1)-Kv1.1(#2)-Kv1.2(#3)-Kv1.2(#4) tetramer-encoding insert.

[0207] In FIG. 2B, agarose gel electrophoresis is performed on Kv1.1(#1)-Kv1.1(#2)-Kv1.2(#3)-Kv1.2(#4)-pIRES2-EGFP plasmid; Lane 1 and 6 indicate linearization of the plamsid using restriction endonuclease Nhe 1; Lane 2 shows the result of a digestion with Nhe I and Bgl II to liberate a Kv 1.1 momomer. Lane 3 shows the result of digestion with Nhe 1 and Eco RI to liberate a Kv1.1-Kv1.1 dimer. Lane 4 shows the result of digestion with Nhe 1 and Sal 1 to liberate a Kv1.1-Kv1.1-Kv1.2 trimer. Lane 5 shows the result of digestion with Nhe I and Bam HI to liberate the entire tetramer.

### Example 4

### Expression of Kv1.X Constructs

[0208] Individual cultures of HEK 293 cells were transfected with a) Kv1.2(#4)-pIRES2-EGFP, b) Kv1.2(#3)-Kv1.2(#4)-pIRES2-EGFP, c) Kv1.1(#3)-Kv1.2(#4)-pIRES2-EGFP, d) Kv1.1(#2)-Kv1.2(#3)-Kv1.2(#4)-pIRES2-EGFP, and e) Kv1.1(#1)-Kv1.1(#2)-Kv1.2(#3)-Kv1.2(#4)-pIRES2-EGFP and permitted to incubate for 48 hours at 37° C.

[0209] Cells from each culture were then prepared by boiling for 3 minutes in 0.5% SDS PAGE reducing buffer, and electrophoresis in a polyacrylamide gel. Following completion of the electrophoresis, the gel was used for electrotransfer of separated proteins onto a nitrocellulose membrane. The membrane was incubated with a primary anti-Kv1.1 or anti-Kv1.2 antibody. A secondary labelled antibody was used to detect the presence of a complex between the first antibody and the Kv1.x protein on the nitrocellulose membrane. For detection, a horse-radish peroxidase-conjugated secondary antibody was used; signals were visualised using an ECL kit (GE). The membrane was then developed in a standard detection step.

[0210] FIG. 3 shows the results of this experiment. Lane 1 shows expression of Kv1.2 momomer from cultures transfected with Kv1.2(#4)-pIRES2-EGFP. Lane 2 shows expression of Kv1.1-Kv1.2 dimer from cultures transfected with Kv1.1(#3)-Kv1.2(#4)-pIRES2-EGFP. Lane 3 shows expression of Kv1.2-Kv1.2 from cultures transfected with Kv1.2(#3)-Kv1.2(#4)-pIRES2-EGFP. Lane 4 shows expression of Kv1.1-Kv1.2-Kv1.2 from cultures transfected with Kv1.1(#2)-Kv1.2(#3)-Kv1.2(#4)-pIRES2-EGFP. Lane 5 shows expression of Kv1.1-Kv1.1-Kv1.2-Kv1.2 from cultures transfected with Kv1.1(#1)-Kv1.1(#2)-Kv1.2(#3)-Kv1.2(#4)-pIRES2-EGFP. All these Western blots were detected using anti-Kv1.2 antibody.

[0211] Lanes 6 and 7 are identical to Lanes 5 and 6, except the Western blots were detected using anti-Kv1.1 antibody rather than anti-Kv1.2 antibody.

### Example 5

### Expression of Functional K⁺ Channels

[0212] HEK 293 cells are transiently transfected with a PIRES2-EGFP vector encoding Kv1.1-1.1-1.2-1.2 (also referred to as forward adjacent channel; see below) and the cells incubated to display the potassium channels on the cell membranes.

[0213] Cells are harvested in 25 mM Tris HCl, 5 mM KCl pH 7.5 Saturatable binding of ¹²⁵I-α-dendrotoxin (DTX), a Kv1-selective toxin, was performed using a filtration assay to measure the amount of assembled channel targeted to the plasmalemma. Transfected cells suspended in binding buffer were incubated for 1 hour with increasing concentrations of labelled DTX; for non-saturable binding experiments, the incubation is performed in the presence of 1 μM unlabeled DTX. Measurements are made in triplicate under established conditions by rapid filtration through GF/F glass microfiber filters presoaked with 0.5% (w/v) polyethyleneimine. The radioactivity associated with the washed filters was quantified by γ-radiation counting.

[0214] FIG. 4A shows the selective binding curves of ¹²⁵I-αDTX for this tetramer, wherein the inverted triangle shows saturable binding, the triangle shows the curve for non-saturable binding, while the square shows the curve for total binding.

[0215] FIG. 4B shows competition experiments of 2.5 nM ¹²⁵I-αD1× to transfected HEK-293 cells by αDTX (closed circle), DTXₖ (open circle), or TsTx-Kα (tityustoxin-Kα) (square), in which ¹²⁵I-αDTX is readily displaced from the Kv1.1-1.1-1.2-1.2 tetramer by these toxins.

[0216] In FIG. 4C a competition experiment is performed incubating transfected HEK cells with 2.5 μM ¹²⁵I-αDTX in the presence of various concentrations of ShK and its derivative ShK-Dap²². Similarly, Shk antagonizes ¹²⁵I-αDTX binding to a greater extent than does the derivative ShK-Dap²².

### Example 6

### Construction of Nucleic Acid Cassettes Encoding Rat Kv1.3, Kv1.4 and Kv1.6 Monomeric Subunits

[0217] Potassium channel Kv1.3 cDNA, Kv1.4 cDNA and Kv1.6 cDNA pAKS plasmids served as PCR templates.

[0218] For the Kv1.3 subunit, the forward PCR primer has the nucleotide sequence:

(SEQ ID. NO: 127)
GTCTAGAATGACCGTGGTGCCCGGGGACCACCTG,

wherein
the underlined portion of SEQ ID NO: 127 indicates an Xba I restriction endonuclease site.

[0219] The reverse Kv1.3 PCR primer has the nucleotide sequence:

(SEQ ID NO: 128)
GCTCGAGGACATCAGTGAATATCTTTTTGATGTTGACAC.

### The

[0220] underlined portion of SEQ ID NO: 128 indicates an Xba I restriction endonuclease site.

[0221] For the Kv1.4 subunit, the forward PCR primer has the nucleotide sequence

(SEQ ID. NO: 129)
GTCTAGAATGGAGGTGGCAATGGTGAGTGCC,

wherein the underlined portion of SEQ ID NO: 129 indicates an Xba I restriction endonuclease site.

[0222] The reverse Kv1.4 PCR primer has the nucleotide sequence:

(SEQ ID NO: 130)
GCTCGAGGACACATCAGTCTCCACAGCCTTTGCATTAG.

The underlined portion of SEQ ID NO: 130 indicates an Xba I restriction endonuclease site.

[0223] For the Kv1.6 subunit, the forward PCR primer has the nucleotide sequence

(SEQ ID. NO: 131)
GTCTAGAATGAGATCGGAGAAATCCCTTACGC,

wherein the underlined portion of SEQ ID NO: 131 indicates an Xba I restriction endonuclease site.

[0224] The reverse Kv1.6 PCR primer has the nucleotide sequence:

(SEQ ID NO: 132)
GCTCGAGGAGACCTCCGTGAGCATTCTTTTCTCTGC.

The underlined portion of SEQ ID NO: 132 indicates an Xba I restriction endonuclease site.

[0225] PCR amplification employing each of the Kv1.3, Kv1.4 and Kv1.6 cDNAs were performed using standard methods and equipment as described in Example 1.

[0226] In a similar fashion to that shown above for Kv1.1 and 1.2 in Example I, Xho I and Xba I sites were introduced into each of these potassium channel subunits using specially designed PCR primer pairs. It is important that the number of nucleotides in the primer corresponding to the 3′ end of the insert be maintained so as to ensure that a spliced additional subunit, if any, be translated in frame.

[0227] For the preparation of cassettes for the construction of expression vector encoding a multimeric protein, PCR-blunt DNA was digested simultaneously with Xho I and Xba I enzymes and excised inserts purified by agarose gel electrophoresis prior to use.

### Example 7-11

### Assembly of Kv1.X Tetramers of Specified Structure

[0228] In these Examples, expression vectors for five specific concatameric tetramers having the following subunits were made essentially as described in Example 3:

1. a Kv1.2 subunit in the first and second position, and a Kv1.1 subunit in the third and fourth position (also referred to as reverse adjacent channel);
2. a Kv1.1 subunit in the first and third position, and a Kv1.2 subunit in the second and fourth position (also referred to as forward diagonal channel);
3. a Kv1.2 subunit in the first and third position, and a Kv1.1 subunit in the second and fourth position (also referred to as reverse diagonal channel);
4. a Kv1.4 subunit in the first position, a Kv1.6 subunit in the second position, a Kv1.1 subunit in the third position and a Kv1.2 subunit in the fourth position; and
5. a Kv1.4 subunit in the first position, a Kv1.6 subunit in the second position, a Kv1.3 subunit in the third position and a Kv1.2 subunit in the fourth position.

[0229] It will be understood by those of skill in the art, the methods and compositions of the present invention are equally applicable to any combination, order or stoichiometry of subunits in a multimeric protein. The drug screening aspects of the present invention are thus equally applicable to ion channel subunits, Na+ channel subunits, Ca++ channel subunits, K+ channel subunits, Kv1.x subunits, and the like.

### Example 12-13

### Expression of Kv1.X Constructs

[0230] Individual cultures of HEK 293 cells were transfected with each of a) Kv1.4(#1)-Kv1.6(#2)-Kv1.1(#3)-Kv1.2(#4)-pIRES2-DsRed and b) Kv1.4(#1)-Kv1.6(#2)-Kv1.3(#3)-Kv1.2(#4)-pIRES2-DsRed and permitted to incubate for 48 hours at 37° C.

[0231] Direct immunoblotting of lysates from the cells above was performed as described in Example 4. FIG. 5 shows immunoblots of lysates of cells transfected with tetrameric constructs in pIRES-DsRed. The lysates were solubilized in LDS sample buffer and immunoprobed with antibodies specific for each of the constituent subunits, Kv1.1, Kv1.2, Kv1.3, Kv1.4 and Kv1.6. The immunoblot results for the tetramer Kv1.4-1.6-1.1-1.2 is shown in lanes 1, 3, 5, 7, 9. The immunoblot results for the tetramer Kv1.4-1.6-1.3-1.2 is shown in lanes 2, 4, 6, 8, 10. Lysates prepared from untransfected cells showed no specific immunoreactivity against the antibodies used.

### Example 14-17

### Expression of Kv1.X Constructs

[0232] Individual cultures of HEK 293 cells were transfected with each of: Kv1.1(#1)-Kv1.1(#2)-Kv1.2(#3)-Kv1.2(#4)-pIRES2-EGFP; Kv1.1(#1)-Kv1.2(#2)-Kv1.1(#3)-Kv1.2(#4)-pIRES2-EGFP; Kv1.2(#1)-Kv1.2(#2)-Kv1.1(#3)-Kv1.1(#4)-pIRES2-EGFP; and Kv1.2(#1)-Kv1.1(#2)-Kv1.2(#3)-Kv1.1(#4)-pIRES2-EGFP. The cultures were permitted to incubate for 48 hours at 37° C. The Kv1.1-1.1-1.2-1.2 tetramer is also referred to as a forward adjacent channel), Kv1.1-1.2-1.1-1.2 is also referred to as a forward diagonal channel), Kv1.2-1.2-1.1-1.1 is also referred to as a reverse adjacent channel), and Kv1.1.2-1.1-1.2-1.1 is also referred to as a reverse diagonal channel, and the resulting transfected cells were allowed to display the potassium channels on the cell membranes.

[0233] The functional potassium channels on the surface were biochemically analyzed. This was accomplished by biotinylation of the surface components of HEK-293 cells transfected with the individual tandem-linked constructs.

[0234] For surface biotinylation, HEK-293 cells transfected as above for 48 hours with these concatenated genes in pIRES2-EGFP were harvested, washed, resuspended at about 2-3×10⁷ cells/ml of PBS, and incubated with 1 mg/ml sulfo-NHS-LC-biotin (Pierce) at room temperature for 30 min. Remaining reagent was quenched with 100 mM glycine for 30 min, samples were solubilised in 2% Triton X-100 for 1 h at 4° C., and centrifuged at 100 000 g for 1 h. The supernatants were incubated with streptavidin-agarose (Pierce) (70 l slurry/ml) overnight at 4° C. with rotation. After washing the pelleted streptavidin-agarose with ice-cold TBS containing 0.1% Tween-20, bound proteins were dissolved in SDS-PAGE sample buffer before Western blotting.

[0235] The solubilised biotinylated proteins were precipitated with streptavidin agarose. FIG. 6 shows a Western blot with anti-Kv1.1 and 1.2 IgGs where, for each of the 4 oligomers, intact tetrameric channels containing both subunit types were expressed on the surface. These tetramers had an apparent molecular weight of ˜240 kDa; an intact protein band (Mr ˜240 k) was obtained from all 4 constructs, indicative of the successful expression of intact heterotetramers.

[0236] FIG. 7 shows the results of restriction mapping digests of tetrameric constructs and intermediates. FIG. 7A shows the sequential release from plRES2-EGFP Kv1.1-1.1-1.2-1.2 of Kv1.1, Kv1.1-1.1, Kv1.1-1.1-1.2 or Kv1.1-1.1-1.2-1.2 inserts, as seen in lanes 1-4 from final Kv1.1-1.1-1.2-1.2 and Kv1.1, Kv1.1-1.2, Kv1.1-1.2-1.1 or Kv1.1-1.2-1.1-1.2 inserts from final pIRES2-EGFP Kv1.1-1.2-1.1-1.2 by digestion with Nhe I and Bgl II, Eco Rl, Sal I or Bam HI, as seen in lanes 5-8 from an agarose (1%) gel electrophoretogram. FIG. 7B shows the sequential release of Kv1.2, Kv1.2-1.2, Kv1.2-1.2-1.1 or Kv1.2-1.2-1.1-1.1 inserts from the final plRES2-EGFP Kv1.2-1.2-1.1-1.1, and, Kv1.2, Kv1.2-1.1, Kv1.2-1.1-1.2 or Kv1.2-1.1-1.2-1.1 inserts from the final pIRES2-EGFP Kv1.2-1.1-1.2-1.1 by digestion with Nhe I and Bgl II, EcoR I, Sal I or Bam HI, as seen in lanes 9-12 and 13, 14, 15 and 17 respectively, and lane 16 represents un-digested or complete pIRES2-EGFP Kv1.2-1.1-1.2-1.1 from an agarose (1%) gel electrophoretogram. The letter “M” in FIG. 7A and FIG. 7B indicates the apparent molecular weight in kbp.

### Example 18-20

### Surface Expression of K Channels

[0237] In these examples, expression of the potassium channels was visualized by double immuno-staining and fluorescence microscopy of COS-7 cells transfected with each of the constructs encoding the tetramers Kv1.1-1.1-1.2-1.2, Kv1.4-1.6-1.1-1.2 and Kv1.4-1.6-1.3-1.2. The COS-7 cells expressing these constructs were labelled with IgGs specific for external epitopes of Kv1.2, and followed by fluorescent microscopy. Fluorescence microscopy of COS-7 cells transfected with the constructs encoding representative heterotetramers using Lipofectamine 2000 was performed according to a surface staining protocol (Tiffany et al., J. Cell. Biol. 148:147-158, (2000). FIGS. 8A, 8B, 8C and 8D show fluorescent micrographs indicating surface expression of 3 fully functional hetero-tetrameric Kv1 channels in COS-cells transfected with the corresponding constructs encoding the tetramers. COS-7 cells, transfected with Kv1.1-1.1-1.2-1.2-pIRES2-EGFP (expression of the corresponding functional channel seen in FIGS. 8A and 8B), Kv1.4-1.6-1.1-1.2-plRES2-EGFP (the expression of the corresponding functional channel seen in FIG. 8C) or Kv1.4-1.6-1.3-1.2-pIRES2-DsRed (the expression of the corresponding functional channel seen in FIG. 8D) were double labelled using an antibody reactive with external epitopes of Kv1.2 (left panels) and monoclonal antibodies specific for Kv1.2 (FIG. 8A), Kv1.1 (FIG. 8B) or Kv1.4 (FIGS. 8C and 8D) (right panels). In all FIGS. 8A-8D, surface labeling was observed (left panels); the surface labelling was distinguished from the total labeling (right panels) using anti-species IgGs coupled to Alexa Fluor 594 or 488, respectively. Only background signals were seen upon omission of primary antibodies.

[0238] Similarly, cell surface expression was demonstrated for the tetramers Kv1.1-1.2-1.1-1.2, Kv1.2-1.2-1.1-1.1 and Kv1.2-1.1-1.2-1.1.

[0239] From these examples, it is established that the above concatenated heteromers successfully traffic intact to the plasma membrane in active form when expressed in mammalian cells. The examples also validate the utilisation of recombinant Kv1 channels as targets for future drug screening.

### Example 21-23

### Comparison of Functional Properties of Heteromeric Tetramer Constructs

[0240] In these examples, the functional properties of the concatenated Kv1 heteromers Kv 1.1-1.1-1.2-1.2, Kv1.4-1.6-1.1-1.2 and Kv1.4-1.6-1.3-1.2 were examined by whole-cell voltage-clamped recordings from the corresponding transfected HEK-293 cells. The activation kinetics of the currents mediated by Kv 1.1-1.1-1.2-1.2 Kv 1.4-1.6-1.1-1.2 and Kv1.4-1.6-1.3-1.2 were determined.

[0241] The sensitivities of the potassium channel currents mediated by Kv 1.1-1.1-1.2-1.2 Kv 1.4-1.6-1.1-1.2 and Kv1.4-1.6-1.3-1.2 to various blockers were also examined in these examples.

[0242] Whole-cell voltage-clamp experiments were performed as outlined in Sokolov, et al., Neuropharmacol. 53:2, 272-282, (2007), whose disclosure is hereby incorporated by reference. The internal solution was (in mM): 90 KCl, 50 KF, 30 KOH, 10 EGTA, 20 HEPES, pH 7.4. The extracellular bath solution contained (in mM) 135 choline chloride, 20 KOH, 1.8 CaCl₂, 1 MgCl₂, and 40 HEPES, pH 7.4, and 0.01% (w/v) BSA. Solutions were exchanged by continuous flow with a peristaltic pump or a Cellectricon Dynaflow-16 system. Series resistance compensation was applied to minimize the voltage error (<10 mV). Correction was made for a calculated liquid junction potential of +8.4 mV. Holding potential was −100 mV. Leak subtraction was used to isolate K⁺ current (I_{K}). Analogue traces were filtered at 5 kHz, and sampled at 50 kHz. Non-linear fitting was carried out with equations described in (Sack et al., Gen. Physiol. 128:1, 119-132, (2006), whose disclosure is hereby incorporated by reference. Data are reported as mean±standard error; n values refer to number of individual cells tested. Statistical significance was evaluated by two-tailed Student's t-test using data obtained from at least five independent experiments performed in parallel.

[0243] FIGS. 9A-9E show that the Kv1.1-1.1-1.2-1.2 construct expresses functionally uniform channels. FIG. 9A shows K⁺ currents (I_{K}) in Kv1.1-1.1-1.2-1.2 channels generated in response to depolarising steps (gray traces) from −40 to 80 mV in 20 mV increments are consistent with an exponential function (black lines). FIG. 9B shows inactivation of I_{K} in Kv1.1-1.1-1.2-1.2 channels during a pulse to 0 mV (gray traces), consistent with an exponential function (black line). FIG. 9C shows deactivation of I_{K} in Kv1.1-1.1-1.2-1.2 channels at −80, −100 or −120 mV (gray traces) after 50 ms at +60 mV, consistent with mono-exponential functions (black lines). FIG. 9D shows time constants (n=3) associated with activation (>−50 mV) or deactivation (<−50 mV) in Kv1.1-1.1-1.2-1.2 channels; lines consistent with exponential functions. FIG. 9E shows the conductance-voltage relationship of outward K⁺ peak currents (n=15) after 100 ms at indicated voltage in Kv1.1-1.1-1.2-1.2 channels; the dashed line is a Boltzmann fit.

[0244] FIG. 10A-10E show that similar Kv1.4-containing hetero-tetrameric channels are distinguishable by DTXₖ and TEA intoxication (tetraethyl ammonium; more details regarding the inhibition given below). FIGS. 10A and 10B show the I_{K} from Kv1.4-1.6-1.1-1.2 and Kv1.4-1.6-1.3-1.2, respectively, induced by 500 ms voltage steps from −100 to 0 mV (black). The effect of 10 nM DTXₖ on I_{K} from Kv1.4-1.6-1.1-1.2 and Kv1.4-1.6-1.3-1.2 induced by 500 ms voltage steps from −100 to 0 mV is in gray. FIG. 10C shows representative current traces of Kv1.4-1.6-1.1-1.2 in response to depolarising steps from −100 to +80 mV in 20 mV increments. FIG. 10D shows gₖ-V relations assembled from peak outward currents from Kv1.4-1.6-1.1-1.2 (closed circles) and Kv1.4-1.6-1.3-1.2 (open circles).

[0245] The biophysical and pharmacological properties of the three channels Kv 1.1-1.1-1.2-1.2, Kv1.4-1.6-1.1-1.2 and Kv1.4-1.6-1.3-1.2 are tabulated in Table 1.

TABLE 1
Biophysical and pharmacological properties of
three hetero-tetrameric K⁺ channels

| | Kv1.1-1.1- | Kv1.4-1.6 | Kv1.4-1.6 |
|---|---|---|---|
| | 1.2-1.2 | 1.1-1.2 | 1.3-1.2 |
| τ-Activation at 0 mV | 1.9 ± 0.1 | 1.5 ± 0.1 | 1.8 ± 0.1 |
| (ms) | (n = 3) | (n = 7) | (n = 5) |
| τ₁-Inactivation at 0 | 540 ± 20 | 45 ± 8 | 47 ± 0.1 |
| mV (ms) | (n = 5) | (n = 7) | (n = 5) |
| τ₂-Inactivation at 0 | 6200 ± 500 | 260 ± 20 | 270 ± 6 |
| mV (ms) | (n = 5) | (n = 7) | (n = 5) |
| V½ (mV) | −12 ± 1.8 | −25 ± 0.6 | −23 ± 0.8 |
| | (n = 13) | (n = 10) | (n = 10) |
| Slope (k) (mV) | 18 ± 1.6 | 11 ± 0.7 | 10 ± 0.5 |
| | (n = 13) | (n = 10) | (n = 10) |

τ measures time following activation at which the channels are opened;
τ₁ and τ₂ are distinct time constants reflecting two inactivation states for the channels under study (values for activation and inactivation were calculated by fitting power and double-exponential functions, respectively.)
V½ is the voltage at which half of the channels are activated.
Slope k = conductance k/voltage mV.
Values for V½ and slope k were calculated from Boltzmann equation fitting of the gₖ-V relations from peak outward currents.

[0246] As mentioned earlier, sensitivities of the potassium channel currents mediated by Kv1.1-1.1-1.2-1.2, Kv1.4-1.6-1.1-1.2 and Kv1.4-1.6-1.3-1.2 to various blockers were also examined in these examples for each of these channels. Inhibition by tetraethylammonium (TEA) αDTX, DTXₖ, 4-aminopyridine (4AP), TsTX and ShK-Dap²² were determined.

[0247] FIG. 9F shows the concentration dependence of TEA inhibition of I_{K} (n=4) during voltage steps to +60 mV for 50 ms in Kv1.1-1.1-1.2-1.2 channels. Inhibition in each cell was normalized (open circles) by saturating value of a fit with Langmuir isotherm (dashed line).

[0248] FIG. 9G shows reduction by αDTX, DTXₖ, 4-aminopyridine (4AP), TsTX and ShK-Dap²² of I_{K} from Kv1.1-1.1-1.2-1.2 (open bars), homomeric Kv1.1 (gray bar) or Kv1.2 (black bar) during voltage steps to +60 mV for 50 ms (n≧5). ShK-Dap²² measurements were conducted in a solution used previously and described in Sokolov et al., Neuropharmacol. 53:2, 272-282, (2007), whose disclosure is hereby incorporated by reference.

[0249] FIG. 10E shows the concentration dependence for TEA inhibition of I_{K} from Kv1.4-1.6-1.1-1.2 (closed circles) or Kv1.4-1.6-1.3-1.2 (open circles) assayed by pulses to 0 mV (n=5) and fit by the Langmuir equation (dashed line) as in FIG. 10C.

[0250] FIG. 10F shows inhibition by 3 DTXₖ concentrations of I_{K} from Kv1.4-1.6-1.1-1.2 (open bars) or Kv1.4-1.6-1.3-1.2 (gray bars), assayed at ≦0 mV showed a significant sensitivity difference (1 nM, p=0.00029 (***); 10 nM, p=0.0002 (***); 100 nM, p=0.00034) (***).

[0251] The data from these examples indicate that the three tetramers are expressed as essentially uniform populations of Kv1 channels that can be distinguished biophysically and by susceptibilities to inhibitors. The K⁺ currents of the three tetramers can be distinguished by inactivation rates and/or by selective inhibitors.

### Example 24-27

### Comparison of Functional Properties of Heteromeric Tetramer Constructs

[0252] In these examples, the functional properties of the Kv1 heteromers Kv1.1-1.1-1.2-1.2, Kv1.1-1.2-1.1-1.2, Kv1.2-2.1-1.1-1.1 and Kv1.2-1.1-1.2-1.1 were compared by whole-cell, voltage-clamp, conventional recordings from HEK-293 cells transfected separately with each of the 4 constructs.

[0253] In these examples the sensitivities of the potassium channel currents mediated by these tetramers to various blockers were also examined. Inhibition by TEA, or Agitoxinl (AgTX1) and TsTX-Kα were determined.

[0254] Whole-cell voltage-clamp was performed as described in Example 25-27, except where specified. For larger scale recordings, an automated patch-clamp system (QPatch 16, Sophion, Denmark) was used; its disposable Qplates contain 16 individual and parallel patch-clamp positions. Cells were detached from culture plates with 0.05% trypsin/EDTA solution and kept in serum-free medium (CHO-S-SFM II [Invitrogen], 25 mM HEPES, pH 7.4, 0.04 μg/ml soya bean trypsin inhibitor, and 10 μg/ml penicillin-streptomycin) in an on-board stirred reservoir. Prior to testing, the cells were automatically transferred to an integral mini-centrifuge, pelleted, re-suspended in external solution (as detailed above) and washed before being applied to the pipeting wells in the Q plate. Giga-seals were formed upon execution of a combined suction/voltage protocol; gradually increasing suction leads to the whole-cell configuration. Compounds were applied, via a 4-way pipeting robot, through integrated glass-coated microfluidic flow channels. Liquid flow is laminar with exchange time constants in the range of 50-100 ms. After application, all fluids were collected in a built-in waste reservoir (250 l). Whole cell currents were measured at a holding potential of −100 mV, then depolarised to +60 mV for 200 ms or stepped from the holding potential in +10 mV increments. Data analysis was performed using an integrated database (Oracle) within Q Patch software (Sophion, Denmark).

[0255] For comparison, values for the biophysical parameters of all 4 heteromers are displayed in Table 2. The four concatamers showed only minor dissimilarities in terms of the parameters for activation, deactivation and gK-V relationship.

TABLE 2
Biophysical and pharmacological properties of
four concatameric K⁺ channels compared to a Kv1.1-1.2
dimer-containing channel

| | | | | Reverse | |
|---|---|---|---|---|---|
| | Adjacent | Reverse adjacent | Diagonal | diagonal | Dimer |
| A/τ at 0 mV, | 1.9 ± 0.1 | 2.3 ± 0.6 | 1.4 ± 0.1 | 1.3 ± 0.1 | 10.6 ± 1.3 |
| (ms) | (3) | (3) | (3) | (4) | (6) |
| fI/τ1 at | 540 ± 2 | 529 ± 50 | 506 ± 34 | 341 ± 17 | — |
| 0 mV (ms) | (5) | (4) | (3) | (4) | |
| sI/τ2 at | 6200 ± 500 | 5053 ± 596 | 3586 ± 485 | 4372 ± 404 | — |
| 0 mV, | (5) | (4) | (3) | (4) | |
| (ms) | | | | | |
| V½ (mV) | −13 ± 1 | −15 ± 1 | −29 ± 3 | −25 ± 1 | 0.7 ± 1.6 |
| | (18) | (6) | (11) | (15) | (9) |
| Slope | 22 ± 1 | 22 ± 2 | 24 ± 2 | 20 ± 2 | 17 ± 1.0 |
| (k) (mV) | (18) | (6) | (11) | (15) | (9) |
| IC₅₀ TEA | 9.7 ± 1 | 6.7 ± 2 | 0.76 ± 0.1 | 0.96 ± 0.14 | 12 ± 1 |
| (mM) | (9) | (4) | (5) | (5) | (8) |
| IC₅₀ | 5 ± 0.4 | 5 ± 0.5 | >1 μM | 1 μM | 39 ± 4 |
| AgTx1 | (23) | (13) | (4) | (5) | (13) |
| (nM) | | | | | |
| IC₅₀ | 26 ± 3 | 25 ± 7 | >1 μM | >1 μM | 33 ± 3 |
| TsTxKα | (3) | (3) | (4) | (3) | (3) |
| (nM) | | | | | |

The values (S.E.M.) for activation (A) and inactivation (fast, fI and slow sI) were calculated by fitting to single-and double-exponential functions, respectively.
V½ and slope k were calculated by Boltzmann equation fitting of the gk-V relations from peak outward currents.
IC₅₀ values (±S.E.M.) were derived from the plots exemplified for TEA and AgTX1 in FIG. 12A and 12B.
Values in brackets/parentheses represent the number of experiments.

[0256] FIGS. 11A-11E show that the adjacent Kv1.1-1.1-1.2-1.2 construct expresses functionally-uniform K⁺ channels. FIGS. 11A-11E are reproduced from FIG. 9 to allow comparison with the other tetrameric channel. FIG. 11A shows the K⁺ currents (I_{K}) from Kv1.1-1.1-1.2-1.2, recorded by conventional patch-clamp, in response to depolarising steps (gray traces) from −40 to +80 mV in +20 mV increments, are consistent with the power of an exponential function (black lines). FIG. 11B shows inactivation of I_{K} from Kv1.1-1.1-1.2-1.2 during a pulse to 0 mV (gray traces), consistent with a double exponential function (black line). FIG. 11C shows deactivation of I_{K} from Kv1.1-1.1-1.2-1.2 at −80, −100 or −120 mV (gray traces) after 50 ms at +60 mV, consistent with mono-exponential function (black lines). FIG. 11D shows time constants (n=3) associated with activation (>−50 mV) or deactivation (<−50 mV) from Kv1.1-1.1-1.2-1.2; lines are consistent with exponential functions. FIG. 11E shows conductance-voltage relationship of outward K⁺ peak currents from Kv1.1-1.1-1.2-1.2 (closed circle; n=15) after 100 ms at indicated voltages; lines are Boltzmann fits. In D and E, error bars represent ±S.D.

[0257] FIG. 12A-12C show that adjacently and diagonally-arranged Kv1.1 and 1.2 gene constructs yield channels that can be distinguished by TEA, or AgTX1 and TsTX-Kα. FIG. 12A shows Q Patch voltage-clamp records of the inhibition of K⁺ currents from the channels specified by TEA, AgTX1 or TsTx-Kα. Left panels depict current amplitudes in the absence, presence for the times shown by the bars of different concentrations of the agents, after wash-out of each dose (i) or final removal of blockers (iv). The middle and right panels show representative current traces from adjacently- and diagonally-arranged channels, respectively, in the absence (black line) and presence (grey) of the concentrations shown for each compound.

[0258] FIG. 12B shows dose-response curves for the forward Kv1.1-1.1-1.2-1.2 (open circles) and reverse Kv1.2-1.2-1.1-1.1 (closed circles) adjacent channels show a ˜11-fold lower affinity for TEA than the corresponding diagonals (open triangle and closed inverted triangle). (Inset) The channel made using the dimer (Kv1.1-1.2) showed a TEA susceptibility similar to that of both the adjacent arrangements.

[0259] FIG. 12C shows dose dependence curves for the sensitivities of adjacent (open circles) and diagonal (closed circles) oligomers to AgTX1; note that the later proved virtually insensitive. The bar diagram shows the inhibition of Iₖ produced by channels containing Kv1.2 (black square), Kv1.2-1.2 (grey square) and Kv1.1-1.2 (open square). All dose response curves were fitted using the Hill equation, where the slopes were between 0.76 and 0.92. The difference in sensitivity to AgTX1 of channels made from Kv1.1-1.2 dimer and Kv1.2 monomer is not statistically significant (p=0.0984 and 0.1321, respectively, unpaired t-test). All the IC₅₀s are listed in Table 2 together with the n values and error bars.

[0260] The data from these examples establish the importance of α subunit arrangements within these particular concatamers in governing pharmacological differences and how oligomeric subtypes can be distinguished with appropriate blockers. It will be understood that the present invention is equally applicable to all mammalian, avian, or reptilian neurons, including, without exception, rat, mouse, human, canine, bovine, equine, and feline systems.

[0261] The preceding Examples comprise specific embodiments of the present invention, but are not intended to, and do not limit the scope of the invention thereto. The present invention is defined solely by the claims that conclude this specification. Although the foregoing invention has been described in detail for purposes of clarity of understanding, it will be obvious that certain modifications may be practiced within the scope of the appended claims. All publications and patent documents cited herein are hereby incorporated by reference in their entirety for all purposes to the same extent as if each were so individually denoted.

The application's sequence listing, which the Patent Office published only in electronic form, follows.

SEQUENCE LISTING (124 sequences)

SEQ ID NO: 1 - DNA, 6160 bp, Homo sapiens
tcaggccggcagcggggagccgagtggaggctaattttacttgctgggagcgaggagagtaatcctcctgccccccactcctgccccgccccctggctggctcagcagggcagctcagccgacagcctcagccagcctagtccccaaggcgggggcattggggacacagggaagggaaagcactggggtgggggagcaggagaaagccagattcccagggaagccatggagccatcctcaccccaggatgaaggcctgaggaagaaacagcccaagaagccagttcctgagattctgccaaggccaccccgggctttgttctgcctgaccctggagaaccccctgaggaaggcctgcatcagcattgtagaatggaagcccttcgagacgatcatcttgctcaccatctttgccaattgtgtggccctggccgtgtacctgcccatgccggaagatgacaacaactctctgaacctcggcctggagaagctggagtatttcttcctcattgtcttctcgattgaagccgccatgaagatcattgcctacggcttcttattccaccaggacgcttacctgcgcagtggctggaatgtgctggacttcaccattgtcttcctgggggtcttcaccgtgattctggaacaggttaacgtcatccaaagccacacagccccaatgagcagcaaaggagccggcttggatgtcaaggccctcagagccttccgagtgctcagacccctccggctggtgtcgggggtgcctagcctgcaggtggtcctgaactccatcttcaaggccatgctccccctctttcacatcgccctgctggtcctctttatggtcatcatctatgccatcatcgggctggagctcttcaagggcaagatgcacaagacctgctacttcattggtacagatatcgtggccacggtggagaatgaagagccatcgccctgcgccaggacgggctcagggcgccggtgcaccatcaatggcagtgagtgccggggcggctgcccagggcccaaccatggcatcacccacttcgacaacttcggcttctccatgctcaccgtgtaccagtgcattaccatggagggatggactgacgtcctttactgggtcaatgatgccatcgggaatgagtggccctggatctattttgtcaccctcattttgctgggatccttcttcatcctcaacctggtgctgggtgtcctgagtggggaattcaccaaggagcgggagaaggccaagtccaggggaaccttccagaagctccgggagaagcagcaactagatgaggaccttcggggctacatgagctggatcacgcagggcgaggtcatggatgttgaggacttcagagaaggaaaactgtctttggatgaaggtggctctgacacagagagcctgtatgaaattgcaggcttgaacaaaatcatccagttcatccgacattggaggcagtggaaccgcatctttcgctggaagtgccatgacatcgtgaagtccaaggtcttctattggctggtgattctcatcgttgccctcaacaccctgtctatcgcctcagagcaccacaaccagccgcactggctgacccgtttgcaagacattgccaaccgggtgctgctgtccctcttcaccactgagatgctgatgaagatgtacgggctgggcctgcgccagtacttcatgtctatcttcaaccgcttcgactgcttcgtggtgtgcagcggtatcctggagatcctgctggtggagtcgggcgccatgacacccctgggcatctccgtgctccgctgcatccgcctcctgaggatcttcaagatcaccaaatattggacgtcgctgagcaacctggtggcatccctgctcaactccatccgctccatcgcctccctgctgctgctgctcttcctcttcatcgtcatcttccgcctcctgggcatgcagctctttggggggaggtatgactttgaagacacagaagtacggcgcagcaactttgacaactttccccaagccctcatcagcgtcttccaggtactgacaggggaagactggacctcaatgatgtacaatgggatcatggcctcgagcgggccgtcctaccctggcatgcttgtgtgcatttacttcatcatccttttcgtctgtggcaactacatcctgctcaatgtcttcctggccattgccgtggacaacctggccgaggcggagagcctgacttctgcccagaaggccaaggctgaggagaaaaaacgcaggaagatgtccaagggtctcccagacaagtcagaagaggagaagtcaacgatggccaagaagctggagcagaaacccaagggtgagggcatccccaccactgccaagctgaaaatcgatgagtttgaatctaatgtcaatgaggtgaaggatccctacccctcagccgacttcccaggggatgacgaggaagatgagcctgagatcccgctgagcccccgaccacgtcccctggctgagctgcagctgaaagagaaggccgtgcccattccagaagccagctccttcttcatcttcagccccaccaataagatccgtgtcctgtgtcaccgcatcgtcaatgccacctggttcaccaacttcatcctgctcttcatcctgctcagcagcgctgcactggctgcggaagaccccatccgggctgattccatgagaaatcagatccttaaacactttgacatcgggttcacctctgtcttcactgtggagattgtcctcaagatgacgacctacggagccttcctgcacaagggttccttctgccgcaattacttcaacatgctggacctgctggtggtggccgtgtccctcatctccatgggacttgagtccagtgccatctccgtggtgaagatcctgagggtgctgagggtgctccgaccactcagagccatcaacagagccaaggggttgaagcacgtggctaggtgcatgttcgtggccatcagcaccatcgggaacatcgtgctggtcactaccctcctacagttcatgtttgcctgcatcggcgtccagctcttcaaggggaagttcttcaggtgcaccgacttgtccaagatgacagaggaggagtgcaggggctactactacgtgtacaaggacggggaccccatgcagatagagctgcgtcaccgcgagtgggtacacagcgacttccacttcgacaatgtgctctcagccatgatgtccctcttcacggtctccaccttcgagggatggcctcagctgctgtacaaggccatagactccaatgcggaggacgtgggtcccatctacaacaaccgtgtggagatggccatcttcttcatcatctacatcatcctcattgccttcttcatgatgaacatctttgtgggcttcgtcattgtcaccttccaggagcagggagagactgagtacaagaactgtgagctggacaagaaccagcgccaatgtgtacagtatgccctgaaggcccgcccactgaggtgctacattcccaaaaacccataccagtaccaggtgtggtacattgtcacctcctcctactttgaatacctgatgtttgccctcatcatgctcaacaccatctgcctcggcatgcagcactacaaccagtcggagcagatgaaccacatctcagacatcctcaatgtggccttcactatcatcttcaccctggagatgatcctcaagctcatggccttcaaggccaggggctactttggaaacccctggaatgtgtttgacttcctgattgtcattggcagcatcattgatgtcatcctcagtgagatcgacactttcctggcctccagcgggggactgtattgcctgggtggaggctgcgggaacgttgacccagatgagagtgcccgcatctccagcgccttcttccgcctgttccgtgtcatgaggctgatcaagctgctgagccgggcagaaggagtgcgaaccctcctgtggacgttcatcaagtccttccaggccctaccctacgtggctctgctcatcgtcatgctcttcttcatctacgctgtcatcggcatgcagatgtttgggaagatcgccttggtggatgggacccaaataaaccggaacaacaacttccagaccttcccacaagctgtgctactgctcttcaggtgtgcaacaggtgaggcctggcaggagatcctactggcctgcagctatgggaagctgtgtgacccagagtcggactatgccccaggggaggagtacacatgtggcaccaactttgcatactactacttcatcagcttctacatgctctgtgccttcctggtcatcaacctctttgtggctgtcatcatggacaattttgactacctcacccgggactggtccatcctgggccctcatcacctggatgagttcaaggccatctgggcagagtatgacccagaggctaaggggaggatcaaacacctggacgtggtgaccctgctgagaaggattcagccccctctgggctttgggaagttctgcccacatcgggtagcttgtaagcggctggtgggcatgaacatgcccctgaacagcgacggcacagtcaccttcaatgccacactctttgccctggtccgcacggcactcaagatcaagacggaaggtaactttgagcaggccaacgaggagctgagggccatcatcaagaagatctggaagagaaccagcatgaagctcttggaccaggtcatccctccaataggagatgatgaggtgacagtggggaagttctacgccacattcctcatccaggagcacttccggaagttcatgaaacgccaagaggagtattatggctatcggcccaagaaggacattgtacagatccaggcagggctgcggaccattgaggaagaggcagcccccgagatctgtcgcacggtctcaggagacctggctgctgaggaggagctggagagagccatggtggaggctgcgatggaggaggggatattccggaggactggaggcctgtttggccaggtggacaacttcctggaaaggaccaactccctgccccctgtcatggccaatcagagacccctccagtttgctgagatagagatggaagagatggagtcacctgtcttcttggaggacttcccacaagatccacgcaccaaccccctggctcgtgccaataccaacaatgccaacgccaatgtcgcctatgcgaacagcaaccatagcaacagccatgtgttttccagtgtccactatgaaagggagttcccagaagagacagagacgcctgctaccagaggacgagcccttggccaaccctgcaggtccctgggaccccacagcaaaccctgtgtggagatgctgaagggactgctgacccagagggcaatgcccagaggccaggcacctcctgccccctgccagtgccccagggtggagtcctccatgcctgaggacagaaagagctccacaccagggtctcttcatgaggagacaccccacagcaggagcaccagggagaatacttccaggtgctcagcaccagctacagccctgctgatccaaaaggctctggttcgagggggcctgggcaccttggcagctgatgcaaacttcatcatggcaacaggccaggccctcggagatgcctgccaaatggaaccagaggaagtggagatcatggcaacagagctactgaaaggacgagaggccccagacggcatggccagctccctgggatgcctgaacctcgggtcctccctgggcagcctcgaccaacaccagggctcccaggagacccttattcctccaaggctgtgatgcccacacagcatcagcatgggcttagagctggcatgaccaatgggggtggggaagttgctggggtggagaagggctagcccaccgcagcagcctccctccctctcagcagctagatgcatgcctgaggcagggtggtcaggaaccacctcaaaaagtgcggaggaagtagctggacaggccctgcccctcaccagcaagaggcatgattggatggagcttctaatgtcattcaaaaaggcctggtcagtgcctgtccctagggccactcccacctgcaggacattaaaatctccaggcctgtgacactggc

SEQ ID NO: 2 - protein, 1873 aa, Homo sapiens
MEPSSPQDEGLRKKQPKKPVPEILPRPPRALFCLTLENPLRKACISIVEWKPFETIILLTIFANCVALAVYLPMPEDDNNSLNLGLEKLEYFFLIVFSIEAAMKIIAYGFLFHQDAYLRSGWNVLDFTIVFLGVFTVILEQVNVIQSHTAPMSSKGAGLDVKALRAFRVLRPLRLVSGVPSLQVVLNSIFKAMLPLFHIALLVLFMVIIYAIIGLELFKGKMHKTCYFIGTDIVATVENEEPSPCARTGSGRRCTINGSECRGGCPGPNHGITHFDNFGFSMLTVYQCITMEGWTDVLYWVNDAIGNEWPWIYFVTLILLGSFFILNLVLGVLSGEFTKEREKAKSRGTFQKLREKQQLDEDLRGYMSWITQGEVMDVEDFREGKLSLDEGGSDTESLYEIAGLNKIIQFIRHWRQWNRIFRWKCHDIVKSKVFYWLVILIVALNTLSIASEHHNQPHWLTRLQDIANRVLLSLFTTEMLMKMYGLGLRQYFMSIFNRFDCFVVCSGILEILLVESGAMTPLGISVLRCIRLLRIFKITKYWTSLSNLVASLLNSIRSIASLLLLLFLFIVIFRLLGMQLFGGRYDFEDTEVRRSNFDNFPQALISVFQVLTGEDWTSMMYNGIMASSGPSYPGMLVCIYFIILFVCGNYILLNVFLAIAVDNLAEAESLTSAQKAKAEEKKRRKMSKGLPDKSEEEKSTMAKKLEQKPKGEGIPTTAKLKIDEFESNVNEVKDPYPSADFPGDDEEDEPEIPLSPRPRPLAELQLKEKAVPIPEASSFFIFSPTNKIRVLCHRIVNATWFTNFILLFILLSSAALAAEDPIRADSMRNQILKHFDIGFTSVFTVEIVLKMTTYGAFLHKGSFCRNYFNMLDLLVVAVSLISMGLESSAISVVKILRVLRVLRPLRAINRAKGLKHVARCMFVAISTIGNIVLVTTLLQFMFACIGVQLFKGKFFRCTDLSKMTEEECRGYYYVYKDGDPMQIELRHREWVHSDFHFDNVLSAMMSLFTVSTFEGWPQLLYKAIDSNAEDVGPIYNNRVEMAIFFIIYIILIAFFMMNIFVGFVIVTFQEQGETEYKNCELDKNQRQCVQYALKARPLRCYIPKNPYQYQVWYIVTSSYFEYLMFALIMLNTICLGMQHYNQSEQMNHISDILNVAFTIIFTLEMILKLMAFKARGYFGNPWNVFDFLIVIGSIIDVILSEIDTFLASSGGLYCLGGGCGNVDPDESARISSAFFRLFRVMRLIKLLSRAEGVRTLLWTFIKSFQALPYVALLIVMLFFIYAVIGMQMFGKIALVDGTQINRNNNFQTFPQAVLLLFRCATGEAWQEILLACSYGKLCDPESDYAPGEEYTCGTNFAYYYFISFYMLCAFLVINLFVAVIMDNFDYLTRDWSILGPHHLDEFKAIWAEYDPEAKGRIKHLDVVTLLRRIQPPLGFGKFCPHRVACKRLVGMNMPLNSDGTVTFNATLFALVRTALKIKTEGNFEQANEELRAIIKKIWKRTSMKLLDQVIPPIGDDEVTVGKFYATFLIQEHFRKFMKRQEEYYGYRPKKDIVQIQAGLRTIEEEAAPEICRTVSGDLAAEEELERAMVEAAMEEGIFRRTGGLFGQVDNFLERTNSLPPVMANQRPLQFAEIEMEEMESPVFLEDFPQDPRTNPLARANTNNANANVAYANSNHSNSHVFSSVHYEREFPEETETPATRGRALGQPCRSLGPHSKPCVEMLKGLLTQRAMPRGQAPPAPCQCPRVESSMPEDRKSSTPGSLHEETPHSRSTRENTSRCSAPATALLIQKALVRGGLGTLAADANFIMATGQALGDACQMEPEEVEIMATELLKGREAPDGMASSLGCLNLGSSLGSLDQHQGSQETLIPPRL

SEQ ID NO: 3 - DNA, 1900 bp, Homo sapiens
cagggacgcggggcaggaccgagccgggggcgaagaggacgcgggctgtgtgcgcgcgcggggtcgaccgagtgaggaggagctccaggacagcagggtctacgtcagcagcctgtagtgggcgctgccagatgcgggcttttttttatttgtttcaatgttcctaatgggttcgtttcagaagtgcctcactgttctcgtgacctggagttaaccggaacagcgtcttcattcatttctgttgggaccagacgcggagcctgggtgcgcgagccgccctccgggaggaaggcgcccggctgcgtctgcagaggcggggagaggaggcggcgagggtcccggggcgcgaggaaggcgcctgccctctcccagctcgcaggccccgggcccggccgcgcctctgcggggagagcaccccggcttcccgcgcgccctcaccaaaaggaccctacagcaaacgggtgtctttcgactctgcttgtagaaaccatttgcacatattctgtacgagcctcgctgtctccctagagccagggcctgcggatttggagaagggagcggggcaggacttccaggaggaccccaacccggcccggagagggaggaggaggcctccaggggcgcggagctttggggatgggcgtcgggccggcagtggtgcggctcactccgtccctgcccacctgcgacgggatcccccgaccggcacgggccacgccgagctcccggccagccgccggcccgcaggcagcgcgagggaggagctgcgccgccgggaaggggccgccggctccgcccaaccaggtggtgctgagcttccgctgagcgctcttttgttttgtggtttgacacttttcttgacagcatgttgcagtttcttttcggttttggttttttttaaatgttttattttgctttcccagcgggaggggaggaagaagagtgtttacaaagtcctgtagccccctcacctttctgttttcacttttgccaatgtacatcgggtttggttttcttgtattatttaaacggttgtggtttcctttttccacggaggttcaatagaagccgctgcaggagagttttaccaaccattgtgtatgcccaataatttgttatcatttccttaggtagtaacctatttttgttctggtttggttcggttatctaatggaaaggtaactggcaatgcacttgatgtggtcttgcacatgtgggtgatagagttgggttccttttttatgctgggtgtacaggtgggtttgggagagaggagcatgcgcgagagagtctccgagtgtgtgcgacgcgtgtgtgtgtggtgggttgtctgtgtgcatatgtcctgcccgtgtatatgcacccacaccatgtgcccgtgcacaccagtgactacgcagtcccccctttctggtttagctgtgggaagatctgaatctggggccgtttgaaagcaaaaacaaaccactgtctctgcttctgaaacgggaatcagtaactctttgcattttctgtcccacaagatatgcaaaaacaatgcaataatattcatttaaaaatacaattgtgagttgtgttggcattaaaactgtattttaaaaaaagacagaaatttaagggaaaaacacaagaaggcattttgcttcaatatattccgtgtaatgttttattgcattgataatgtttctgttgaagaaaccgttatacttgaattcaggtcagtttcagtatttttcaaatatttttttaaaactgaattgcaattgtgccaagcgaatataatgaattgaattaagttggttttcggattcacttcttgtatattttgctgcatgtaaagtaaatcattttgtatttggagtgtgacaagctttaaaaaaaaaaaaaaaaaaaaaaaaaa

SEQ ID NO: 4 - protein, 38 aa, Homo sapiens
RDAGQDRAGGEEDAGCVRARGRPSEEELQDSRVYVSSL

SEQ ID NO: 5 - DNA, 5667 bp, Homo sapiens
gccaatggcacggaatgtaggagtggctgggttggcccgaacggaggcatcaccaactttgataactttgcctttgccatgcttactgtgtttcagtgcatcaccatggagggctggacagacgtgctctactggatgaatgatgctatgggatttgaattgccctgggtgtattttgtcagtctcgtcatctttgggtcatttttcgtactaaatcttgtacttggtgtattgagcggagaattctcaaaggaaagagagaaggcaaaagcacggggagatttccagaagctccgggagaagcagcagctggaggaggatctaaagggctacttggattggatcacccaagctgaggacatcgatccggagaatgaggaagaaggaggagaggaaggcaaacgaaatactagcatgcccaccagcgagactgagtctgtgaacacagagaacgtcagcggtgaaggcgagaaccgaggctgctgtggaagtctctggtgctggtggagacggagaggcgcggccaaggcggggccctctgggtgtcggcggtggggtcaagccatctcaaaatccaaactcagccgacgctggcgtcgctggaaccgattcaatcgcagaagatgtagggccgccgtgaagtctgtcacgttttactggctggttatcgtcctggtgtttctgaacaccttaaccatttcctctgagcactacaatcagccagattggttgacacagattcaagatattgccaacaaagtcctcttggctctgttcacctgcgagatgctggtaaaaatgtacagcttgggcctccaagcatatttcgtctctcttttcaaccggtttgattgcttcgtggtgtgtggtggaatcactgagacgatcttggtggaactggaaatcatgtctcccctggggatctctgtgtttcggtgtgtgcgcctcttaagaatcttcaaagtgaccaggcactggacttccctgagcaacttagtggcatccttattaaactccatgaagtccatcgcttcgctgttgcttctgctttttctcttcattatcatcttttccttgcttgggatgcagctgtttggcggcaagtttaattttgatgaaacgcaaaccaagcggagcacctttgacaatttccctcaagcacttctcacagtgttccagatcctgacaggcgaagactggaatgctgtgatgtacgatggcatcatggcttacgggggcccatcctcttcaggaatgatcgtctgcatctacttcatcatcctcttcatttgtggtaactatattctactgaatgtcttcttggccatcgctgtagacaatttggctgatgctgaaagtctgaacactgctcagaaagaagaagcggaagaaaaggagaggaaaaagattgccagaaaagagagcctagaaaataaaaagaacaacaaaccagaagtcaaccagatagccaacagtgacaacaaggttacaattgatgactatagagaagaggatgaagacaaggacccctatccgccttgcgatgtgccagtaggggaagaggaagaggaagaggaggaggatgaacctgaggttcctgccggaccccgtcctcgaaggatctcggagttgaacatgaaggaaaaaattgcccccatccctgaagggagcgctttcttcattcttagcaagaccaacccgatccgcgtaggctgccacaagctcatcaaccaccacatcttcaccaacctcatccttgtcttcatcatgctgagcagcgctgccctggccgcagaggaccccatccgcagccactccttccggaacacgatactgggttactttgactatgccttcacagccatctttactgttgagatcctgttgaagatgacaacttttggagctttcctccacaaaggggccttctgcaggaactacttcaatttgctggatatgctggtggttggggtgtctctggtgtcatttgggattcaatccagtgccatctccgttgtgaagattctgagggtcttaagggtcctgcgtcccctcagggccatcaacagagcaaaaggacttaagcacgtggtccagtgcgtcttcgtggccatccggaccatcggcaacatcatgatcgtcaccaccctcctgcagttcatgtttgcctgtatcggggtccagttgttcaaggggaagttctatcgctgtacggatgaagccaaaagtaaccctgaagaatgcaggggacttttcatcctctacaaggatggggatgttgacagtcctgtggtccgtgaacggatctggcaaaacagtgatttcaacttcgacaacgtcctctctgctatgatggcgctcttcacagtctccacgtttgagggctggcctgcgttgctgtataaagccatcgactcgaatggagagaacatcggcccaatctacaaccaccgcgtggagatctccatcttcttcatcatctacatcatcattgtagctttcttcatgatgaacatctttgtgggctttgtcatcgttacatttcaggaacaaggagaaaaagagtataagaactgtgagctggacaaaaatcagcgtcagtgtgttgaatacgccttgaaagcacgtcccttgcggagatacatccccaaaaacccctaccagtacaagttctggtacgtggtgaactcttcgcctttcgaatacatgatgtttgtcctcatcatgctcaacacactctgcttggccatgcagcactacgagcagtccaagatgttcaatgatgccatggacattctgaacatggtcttcaccggggtgttcaccgtcgagatggttttgaaagtcatcgcatttaagcctaagcactatttcactgatgcatggaacacttttgatgccttaattgttgttggtagcgtcgttgatattgctataactgaagtgaatccaactgaaagtgaaaatgtccctgtcccaactgctacacctgggaactctgaagagagcaatagaatctccatcacctttttccgtcttttccgagtgatgcgattggtgaagcttctcagcaggggggaaggcatccggacattgctgtggacttttattaagtcctttcaggcgctcccgtatgtggccctcctcatagccatgctgttcttcatctatgcggtcattggcatgcagatgtttgggaaagttgccatgagagataacaaccagatcaataggaacaataacttccagacgtttccccaggcggtgctgctgctcttcaggtgtgcaacaggtgaggcctggcaggagatcatgctggcctgtctcccagggaagctctgtgaccctgagtcagattacaaccccggggaggagtatacatgtgggagcaactttgccattgtctatttcatcagtttttacatgctctgtgcatttctgatcatcaatctgtttgtggctgtcatcatggataatttcgactatctgacccgggactggtctattttggggcctcaccatttagatgaattcaaaagaatatggtcagaatatgaccctgaggcaaagggaaggataaaacaccttgatgtggtcactctgcttcgacgcatccagcctcccctggggtttgggaagttatgtccacacagggtagcgtgcaagagattagttgccatgaacatgcctctcaacagtgacgggacagtcatgtttaatgcaaccctgtttgctttggttcgaacggctcttaagatcaagaccgaagggaacctggagcaagctaatgaagaacttcgggctgtgataaagaaaatttggaagaaaaccagcatgaaattacttgaccaagttgtccctccagctggtgatgatgaggtaaccgtggggaagttctatgccactttcctgatacaggactactttaggaaattcaagaaacggaaagaacaaggactggtgggaaagtaccctgcgaagaacaccacaattgccctacaggcgggattaaggacactgcatgacattgggccagaaatccggcgtgctatatcgtgtgatttgcaagatgacgagcctgaggaaacaaaacgagaagaagaagatgatgtgttcaaaagaaatggtgccctgcttggaaaccatgtcaatcatgttaatagtgataggagagattcccttcagcagaccaataccacccaccgtcccctgcatgtccaaaggccttcaattccacctgcaagtgatactgagaaaccgctgtttcctccagcaggaaattcggtgtgtcataaccatcataaccataattccataggaaagcaagttcccacctcaacaaatgccaatctcaataatgccaatatgtccaaagctgcccatggaaagcggcccagcattgggaaccttgagcatgtgtctgaaaatgggcatcattcttcccacaagcatgaccgggagcctcagagaaggtccagtgtgaaaagaacccgctattatgaaacttacattaggtccgactcaggagatgaacagctcccaactatttgccgggaagacccagagatacatggctatttcagggacccccactgcttgggggagcaggagtatttcagtagtgaggaatgctacgaggatgacagctcgcccacctggagcaggcaaaactatggctactacagcagatacccaggcagaaacatcgactctgagaggccccgaggctaccatcatccccaaggattcttggaggacgatgactcgcccgtttgctatgattcacggagatctccaaggagacgcctactacctcccaccccagcatcccaccggagatcctccttcaactttgagtgcctgcgccggcagagcagccaggaagaggtcccgtcgtctcccatcttcccccatcgcacggccctgcctctgcatctaatgcagcaacagatcatggcagttgccggcctagattcaagtaaagcccagaagtactcaccgagtcactcgacccggtcgtgggccacccctccagcaacccctccctaccgggactggacaccgtgctacacccccctgatccaagtggagcagtcagaggccctggaccaggtgaacggcagcctgccgtccctgcaccgcagctcctggtacacagacgagcccgacatctcctaccggactttcacaccagccagcctgactgtccccagcagcttccggaacaaaaacagcgacaagcagaggagtgcggacagcttggtggaggcagtcctgatatccgaaggcttgggacgctatgcaagggacccaaaatttgtgtcagcaacaaaacacgaaatcgctgatgcctgtgacctcaccatcgacgagatggagagtgcagccagcaccctgcttaatgggaacgtgcgtccccgagccaacggggatgtgggccccctctcacaccggcaggactatgagctacaggactttggtcctggctacagcgacgaagagccagaccctgggagggatgaggaggacctggcggatgaaatgatatgcatcaccaccttgtagcccccagcgaggggcagactggctctggcctcaggtggggcgcaggagagccaggggaaaagtgcctcatagttaggaaagtttaggcactagttgggagta

SEQ ID NO: 6 - protein, 1854 aa, Homo sapiens
ANGTECRSGWVGPNGGITNFDNFAFAMLTVFQCITMEGWTDVLYWMNDAMGFELPWVYFVSLVIFGSFFVLNLVLGVLSGEFSKEREKAKARGDFQKLREKQQLEEDLKGYLDWITQAEDIDPENEEEGGEEGKRNTSMPTSETESVNTENVSGEGENRGCCGSLWCWWRRRGAAKAGPSGCRRWGQAISKSKLSRRWRRWNRFNRRRCRAAVKSVTFYWLVIVLVFLNTLTISSEHYNQPDWLTQIQDIANKVLLALFTCEMLVKMYSLGLQAYFVSLFNRFDCFVVCGGITETILVELEIMSPLGISVFRCVRLLRIFKVTRHWTSLSNLVASLLNSMKSIASLLLLLFLFIIIFSLLGMQLFGGKFNFDETQTKRSTFDNFPQALLTVFQILTGEDWNAVMYDGIMAYGGPSSSGMIVCIYFIILFICGNYILLNVFLAIAVDNLADAESLNTAQKEEAEEKERKKIARKESLENKKNNKPEVNQIANSDNKVTIDDYREEDEDKDPYPPCDVPVGEEEEEEEEDEPEVPAGPRPRRISELNMKEKIAPIPEGSAFFILSKTNPIRVGCHKLINHHIFTNLILVFIMLSSAALAAEDPIRSHSFRNTILGYFDYAFTAIFTVEILLKMTTFGAFLHKGAFCRNYFNLLDMLVVGVSLVSFGIQSSAISVVKILRVLRVLRPLRAINRAKGLKHVVQCVFVAIRTIGNIMIVTTLLQFMFACIGVQLFKGKFYRCTDEAKSNPEECRGLFILYKDGDVDSPVVRERIWQNSDFNFDNVLSAMMALFTVSTFEGWPALLYKAIDSNGENIGPIYNHRVEISIFFIIYIIIVAFFMMNIFVGFVIVTFQEQGEKEYKNCELDKNQRQCVEYALKARPLRRYIPKNPYQYKFWYVVNSSPFEYMMFVLIMLNTLCLAMQHYEQSKMFNDAMDILNMVFTGVFTVEMVLKVIAFKPKHYFTDAWNTFDALIVVGSVVDIAITEVNPTESENVPVPTATPGNSEESNRISITFFRLFRVMRLVKLLSRGEGIRTLLWTFIKSFQALPYVALLIAMLFFIYAVIGMQMFGKVAMRDNNQINRNNNFQTFPQAVLLLFRCATGEAWQEIMLACLPGKLCDPESDYNPGEEYTCGSNFAIVYFISFYMLCAFLIINLFVAVIMDNFDYLTRDWSILGPHHLDEFKRIWSEYDPEAKGRIKHLDVVTLLRRIQPPLGFGKLCPHRVACKRLVAMNMPLNSDGTVMFNATLFALVRTALKIKTEGNLEQANEELRAVIKKIWKKTSMKLLDQVVPPAGDDEVTVGKFYATFLIQDYFRKFKKRKEQGLVGKYPAKNTTIALQAGLRTLHDIGPEIRRAISCDLQDDEPEETKREEEDDVFKRNGALLGNHVNHVNSDRRDSLQQTNTTHRPLHVQRPSIPPASDTEKPLFPPAGNSVCHNHHNHNSIGKQVPTSTNANLNNANMSKAAHGKRPSIGNLEHVSENGHHSSHKHDREPQRRSSVKRTRYYETYIRSDSGDEQLPTICREDPEIHGYFRDPHCLGEQEYFSSEECYEDDSSPTWSRQNYGYYSRYPGRNIDSERPRGYHHPQGFLEDDDSPVCYDSRRSPRRRLLPPTPASHRRSSFNFECLRRQSSQEEVPSSPIFPHRTALPLHLMQQQIMAVAGLDSSKAQKYSPSHSTRSWATPPATPPYRDWTPCYTPLIQVEQSEALDQVNGSLPSLHRSSWYTDEPDISYRTFTPASLTVPSSFRNKNSDKQRSADSLVEAVLISEGLGRYARDPKFVSATKHEIADACDLTIDEMESAASTLLNGNVRPRANGDVGPLSHRQDYELQDFGPGYSDEEPDPGRDEEDLADEMICITTL

SEQ ID NO: 7 - DNA, 634 bp, Homo sapiens
  modified_base (52): a, c, t, g, unknown or other
  modified_base (353): a, c, t, g, unknown or other
  modified_base (382): a, c, t, g, unknown or other
  modified_base (428): a, c, t, g, unknown or other
  modified_base (445): a, c, t, g, unknown or other
  modified_base (511): a, c, t, g, unknown or other
  modified_base (521): a, c, t, g, unknown or other
  modified_base (535): a, c, t, g, unknown or other
  modified_base (557): a, c, t, g, unknown or other
  modified_base (584): a, c, t, g, unknown or other
  modified_base (593): a, c, t, g, unknown or other
  modified_base (613): a, c, t, g, unknown or other
  modified_base (622): a, c, t, g, unknown or other
ttttttttttttttttttttttttttgtggtccatgcctgcctcctgctggngaggggagggcaggaggtttattgagcagttggggaggggtgggaattcagagggcgtggacgcaggccatctcgtctcccaagtcctcctcatcgaagcgggagaggatggactcctcgtcgctatagagagagctggttccctgtgccagcaggtcactggcagcattgtccatctcatccagcgtcaggcgacacgcatctgcaatctcctgcttggccagggccacgaaacgtgggtctcgagcaaagaggcccagaccctctgagataagcacagcctccaccaagctgtcggcantgcccctcttcccatggctggggtccgantgggttccaggcacgtgcagacaggtgaaggtgcgcagtgggccantggatctgccgaggtanccctcccccgctgcgccctttttccaacaacaacagcggggcataaaggaggccgaccccgctgangtggttttgncaggaaacctgagncctattgggccctgaattttgnccacgatgataagtgcctgggatgggntaatcttanaatgcctgggctttaaaaantggatggtnaaggagggttcc

SEQ ID NO: 8 - DNA, 7827 bp, Homo sapiens
ggctcggcccgggcagccgccttctgagcccccgacccgaggcgccgagccgccgccgcccgatgggctgggccgtggagcgtctccgcagtcgtagctccagccgccgcgctcccagccccggcagcctcagcatcagcggcggcggcggcggcggcggcggcgtcttccgcatcgttcgccgcagcgtaacccggagccctttgctctttgcagaatggcccgcttcggagacgagatgccggcccgctacgggggaggaggctccggggcagccgccggggtggtcgtgggcagcggaggcgggcgaggagccgggggcagccggcagggcgggcagcccggggcgcaaaggatgtacaagcagtcaatggcgcagagagcgcggaccatggcactctacaaccccatccccgtccgacagaactgcctcacggttaaccggtctctcttcctcttcagcgaagacaacgtggtgagaaaatacgccaaaaagatcaccgaatggcctccctttgaatatatgattttagccaccatcatagcgaattgcatcgtcctcgcactggagcagcatctgcctgatgatgacaagaccccgatgtctgaacggctggatgacacagaaccatacttcattggaattttttgtttcgaggctggaattaaaatcattgcccttgggtttgccttccacaaaggctcctacttgaggaatggctggaatgtcatggactttgtggtggtgctaacgggcatcttggcgacagttgggacggagtttgacctacggacgctgagggcagttcgagtgctgcggccgctcaagctggtgtctggaatcccaagtttacaagtcgtcctgaagtcgatcatgaaggcgatgatccctttgctgcagatcggcctcctcctattttttgcaatccttatttttgcaatcatagggttagaattttatatgggaaaatttcataccacctgctttgaagaggggacagatgacattcagggtgagtctccggctccatgtgggacagaagagcccgcccgcacctgccccaatgggaccaaatgtcagccctactgggaagggcccaacaacgggatcactcagttcgacaacatcctgtttgcagtgctgactgttttccagtgcataaccatggaagggtggactgatctcctctacaatagcaacgatgcctcagggaacacttggaactggttgtacttcatccccctcatcatcatcggctccttttttatgctgaaccttgtgctgggtgtgctgtcaggggagtttgccaaagaaagggaacgggtggagaaccggcgggcttttctgaagctgaggcggcaacaacagattgaacgtgagctcaatgggtacatggaatggatctcaaaagcagaagaggtgatcctcgccgaggatgaaactgacggggagcagaggcatccctttgatggagctctgcggagaaccaccataaagaaaagcaagacagatttgctcaaccccgaagaggctgaggatcagctggctgatatagcctctgtgggttctcccttcgcccgagccagcattaaaagtgccaagctggagaactcgaccttttttcacaaaaaggagaggaggatgcgtttctacatccgccgcatggtcaaaactcaggccttctactggactgtactcagtttggtagctctcaacacgctgtgtgttgctattgttcactacaaccagcccgagtggctctccgacttcctttactatgcagaattcattttcttaggactctttatgtccgaaatgtttataaaaatgtacgggcttgggacgcggccttacttccactcttccttcaactgctttgactgtggggttatcattgggagcatcttcgaggtcatctgggctgtcataaaacctggcacatcctttggaatcagcgtgttacgagccctcaggttattgcgtattttcaaagtcacaaagtactgggcatctctcagaaacctggtcgtctctctcctcaactccatgaagtccatcatcagcctgttgtttctccttttcctgttcattgtcgtcttcgcccttttgggaatgcaactcttcggcggccagtttaatttcgatgaagggactcctcccaccaacttcgatacttttccagcagcaataatgacggtgtttcagatcctgacgggcgaagactggaacgaggtcatgtacgacgggatcaagtctcaggggggcgtgcagggcggcatggtgttctccatctatttcattgtactgacgctctttgggaactacaccctcctgaatgtgttcttggccatcgctgtggacaatctggccaacgcccaggagctcaccaaggacgagcaagaggaagaagaagcagcgaaccagaaacttgccctacagaaagccaaggaggtggcagaagtgagtcctctgtccgcggccaacatgtctatagctgtgaaagagcaacagaagaatcaaaagccagccaagtccgtgtgggagcagcggaccagtgagatgcgaaagcagaacttgctggccagccgggaggccctgtataacgaaatggacccggacgagcgctggaaggctgcctacacgcggcacctgcggccagacatgaagacgcacttggaccggccgctggtggtggacccgcaggagaaccgcaacaacaacaccaacaagagccgggcggccgagcccaccgtggaccagcgcctcggccagcagcgcgccgaggacttcctcaggaaacaggcccgctaccacgatcgggcccgggaccccagcggctcggcgggcctggacgcacggaggccctgggcgggaagccaggaggccgagctgagccgggagggaccctacggccgcgagtcggaccaccacgcccgggagggcagcctggagcaacccgggttctgggagggcgaggccgagcgaggcaaggccggggacccccaccggaggcacgtgcaccggcaggggggcagcagggagagccgcagcgggtccccgcgcacgggcgcggacggggagcatcgacgtcatcgcgcgcaccgcaggcccggggaggagggtccggaggacaaggcggagcggagggcgcggcaccgcgagggcagccggccggcccggggcggcgagggcgagggcgagggccccgacgggggcgagcgcaggagaaggcaccggcatggcgctccagccacgtacgagggggacgcgcggagggaggacaaggagcggaggcatcggaggaggaaagagaaccagggctccggggtccctgtgtcgggccccaacctgtcaaccacccggccaatccagcaggacctgggccgccaagacccacccctggcagaggatattgacaacatgaagaacaacaagctggccaccgcggagtcggccgctccccacggcagccttggccacgccggcctgccccagagcccagccaagatgggaaacagcaccgaccccggccccatgctggccatccctgccatggccaccaacccccagaacgccgccagccgccggacgcccaacaacccggggaacccatccaatcccggcccccccaagacccccgagaatagccttatcgtcaccaaccccagcggcacccagaccaattcagctaagactgccaggaaacccgaccacaccacagtggacatccccccagcctgcccaccccccctcaaccacaccgtcgtacaagtgaacaaaaacgccaacccagacccactgccaaaaaaagaggaagagaagaaggaggaggaggaagacgaccgtggggaagacggccctaagccaatgcctccctatagctccatgttcatcctgtccacgaccaacccccttcgccgcctgtgccattacatcctgaacctgcgctactttgagatgtgcatcctcatggtcattgccatgagcagcatcgccctggccgccgaggaccctgtgcagcccaacgcacctcggaacaacgtgctgcgatactttgactacgtttttacaggcgtctttacctttgagatggtgatcaagatgattgacctggggctcgtcctgcatcagggtgcctacttccgtgacctctggaatattctcgacttcatagtggtcagtggggccctggtagcctttgccttcactggcaatagcaaaggaaaagacatcaacacgattaaatccctccgagtcctccgggtgctacgacctcttaaaaccatcaagcggctgccaaagctcaaggctgtgtttgactgtgtggtgaactcacttaaaaacgtcttcaacatcctcatcgtctacatgctattcatgttcatcttcgccgtggtggctgtgcagctcttcaaggggaaattcttccactgcactgacgagtccaaagagtttgagaaagattgtcgaggcaaatacctcctctacgagaagaatgaggtgaaggcgcgagaccgggagtggaagaagtatgaattccattacgacaatgtgctgtgggctctgctgaccctcttcaccgtgtccacgggagaaggctggccacaggtcctcaagcattcggtggacgccacctttgagaaccagggccccagccccgggtaccgcatggagatgtccattttctacgtcgtctactttgtggtgttccccttcttctttgtcaatatctttgtggccttgatcatcatcaccttccaggagcaaggggacaagatgatggaggaatacagcctggagaaaaatgagagggcctgcattgatttcgccatcagcgccaagccgctgacccgacacatgccgcagaacaagcagagcttccagtaccgcatgtggcagttcgtggtgtctccgcctttcgagtacacgatcatggccatgatcgccctcaacaccatcgtgcttatgatgaagttctatggggcttctgttgcttatgaaaatgccctgcgggtgttcaacatcgtcttcacctccctcttctctctggaatgtgtgctgaaagtcatggcttttgggattctgaattatttccgcgatgcctggaacatcttcgactttgtgactgttctgggcagcatcaccgatatcctcgtgactgagtttgggaataacttcatcaacctgagctttctccgcctcttccgagctgcccggctcatcaaacttctccgtcagggttacaccatccgcattcttctctggacctttgtgcagtccttcaaggccctgccttatgtctgtctgctgatcgccatgctcttcttcatctatgccatcattgggatgcaggtgtttggtaacattggcatcgacgtggaggacgaggacagtgatgaagatgagttccaaatcactgagcacaataacttccggaccttcttccaggccctcatgcttctcttccggagtgccaccggggaagcttggcacaacatcatgctttcctgcctcagcgggaaaccgtgtgataagaactctggcatcctgactcgagagtgtggcaatgaatttgcttatttttactttgtttccttcatcttcctctgctcgtttctgatgctgaatctctttgtcgccgtcatcatggacaactttgagtacctcacccgagactcctccatcctgggcccccaccacctggatgagtacgtgcgtgtctgggccgagtatgaccccgcagcttgcggtcggattcattataaggatatgtacagtttattacgagtaatatctccccctctcggcttaggcaagaaatgtcctcatagggttgcttgcaagcggcttctgcggatggacctgcccgtcgcagatgacaacaccgtccacttcaattccaccctcatggctctgatccgcacagccctggacatcaagattgccaagggaggagccgacaaacagcagatggacgctgagctgcggaaggagatgatggcgatttggcccaatctgtcccagaagacgctagacctgctggtcacacctcacaagtccacggacctcaccgtggggaagatctacgcagccatgatgatcatggagtactaccggcagagcaaggccaagaagctgcaggccatgcgcgaggagcaggaccggacacccctcatgttccagcgcatggagcccccgtccccaacgcaggaagggggacctggccagaacgccctcccctccacccagctggacccaggaggagccctgatggctcacgaaagcggcctcaaggagagcccgtcctgggtgacccagcgtgcccaggagatgttccagaagacgggcacatggagtccggaacaaggcccccctaccgacatgcccaacagccagcctaactctcagtccgtggagatgcgagagatgggcagagatggctactccgacagcgagcactacctccccatggaaggccagggccgggctgcctccatgccccgcctccctgcagagaaccagaggagaaggggccggccacgtgggaataacctcagtaccatctcagacaccagccccatgaagcgttcagcctccgtgctgggccccaaggcccgacgcctggacgattactcgctggagcgggtcccgcccgaggagaaccagcggcaccaccagcggcgccgcgaccgcagccaccgcgcctctgagcgctccctgggccgctacaccgatgtggacacaggcttggggacagacctgagcatgaccacccaatccggggacctgccgtcgaaggagcgggaccaggagcggggccggcccaaggatcggaagcatcgacagcaccaccaccaccaccaccaccaccaccatcccccgccccccgacaaggaccgctatgcccaggaacggccggaccacggccgggcacgggctcgggaccagcgctggtcccgctcgcccagcgagggccgagagcacatggcgcaccggcagggcagtagttccgtaagtggaagcccagccccctcaacatctggtaccagcactccgcggcggggccgccgccagctcccccagaccccctccaccccccggccacacgtgtcctattcccctgtgatccgtaaggccggcggctcggggcccccgcagcagcagcagcagcagcagcagcagcagcaggcggtggccaggccgggccgggcggccaccagcggccctcggaggtacccaggccccacggccgagcctctggccggagatcggccgcccacggggggccacagcagcggccgctcgcccaggatggagaggcgggtcccaggcccggcccggagcgagtcccccagggcctgtcgacacggcggggcccggtggccggcatctggcccgcacgtgtccgaggggcccccgggtccccggcaccatggctactaccggggctccgactacgacgaggccgatggcccgggcagcgggggcggcgaggaggccatggccggggcctacgacgcgccaccccccgtacgacacgcgtcctcgggcgccaccgggcgctcgcccaggactccccgggcctcgggcccggcctgcgcctcgccttctcggcacggccggcgactccccaacggctactacccggcgcacggactggccaggccccgcgggccgggctccaggaagggcctgcacgaaccctacagcgagagtgacgatgattggtgctaagcccgggcgagggaattcgatatcaagcttatcgataccgtcgacctcgagggggggcccggtaccaattcgccctatagtgagtcgtatta

SEQ ID NO: 9 - protein, 2505 aa, Homo sapiens
MARFGDEMPARYGGGGSGAAAGVVVGSGGGRGAGGSRQGGQPGAQRMYKQSMAQRARTMALYNPIPVRQNCLTVNRSLFLFSEDNVVRKYAKKITEWPPFEYMILATIIANCIVLALEQHLPDDDKTPMSERLDDTEPYFIGIFCFEAGIKIIALGFAFHKGSYLRNGWNVMDFVVVLTGILATVGTEFDLRTLRAVRVLRPLKLVSGIPSLQVVLKSIMKAMIPLLQIGLLLFFAILIFAIIGLEFYMGKFHTTCFEEGTDDIQGESPAPCGTEEPARTCPNGTKCQPYWEGPNNGITQFDNILFAVLTVFQCITMEGWTDLLYNSNDASGNTWNWLYFIPLIIIGSFFMLNLVLGVLSGEFAKERERVENRRAFLKLRRQQQIERELNGYMEWISKAEEVILAEDETDGEQRHPFDGALRRTTIKKSKTDLLNPEEAEDQLADIASVGSPFARASIKSAKLENSTFFHKKERRMRFYIRRMVKTQAFYWTVLSLVALNTLCVAIVHYNQPEWLSDFLYYAEFIFLGLFMSEMFIKMYGLGTRPYFHSSFNCFDCGVIIGSIFEVIWAVIKPGTSFGISVLRALRLLRIFKVTKYWASLRNLVVSLLNSMKSIISLLFLLFLFIVVFALLGMQLFGGQFNFDEGTPPTNFDTFPAAIMTVFQILTGEDWNEVMYDGIKSQGGVQGGMVFSIYFIVLTLFGNYTLLNVFLAIAVDNLANAQELTKDEQEEEEAANQKLALQKAKEVAEVSPLSAANMSIAVKEQQKNQKPAKSVWEQRTSEMRKQNLLASREALYNEMDPDERWKAAYTRHLRPDMKTHLDRPLVVDPQENRNNNTNKSRAAEPTVDQRLGQQRAEDFLRKQARYHDRARDPSGSAGLDARRPWAGSQEAELSREGPYGRESDHHAREGSLEQPGFWEGEAERGKAGDPHRRHVHRQGGSRESRSGSPRTGADGEHRRHRAHRRPGEEGPEDKAERRARHREGSRPARGGEGEGEGPDGGERRRRHRHGAPATYEGDARREDKERRHRRRKENQGSGVPVSGPNLSTTRPIQQDLGRQDPPLAEDIDNMKNNKLATAESAAPHGSLGHAGLPQSPAKMGNSTDPGPMLAIPAMATNPQNAASRRTPNNPGNPSNPGPPKTPENSLIVTNPSGTQTNSAKTARKPDHTTVDIPPACPPPLNHTVVQVNKNANPDPLPKKEEEKKEEEEDDRGEDGPKPMPPYSSMFILSTTNPLRRLCHYILNLRYFEMCILMVIAMSSIALAAEDPVQPNAPRNNVLRYFDYVFTGVFTFEMVIKMIDLGLVLHQGAYFRDLWNILDFIVVSGALVAFAFTGNSKGKDINTIKSLRVLRVLRPLKTIKRLPKLKAVFDCVVNSLKNVFNILIVYMLFMFIFAVVAVQLFKGKFFHCTDESKEFEKDCRGKYLLYEKNEVKARDREWKKYEFHYDNVLWALLTLFTVSTGEGWPQVLKHSVDATFENQGPSPGYRMEMSIFYVVYFVVFPFFFVNIFVALIIITFQEQGDKMMEEYSLEKNERACIDFAISAKPLTRHMPQNKQSFQYRMWQFVVSPPFEYTIMAMIALNTIVLMMKFYGASVAYENALRVFNIVFTSLFSLECVLKVMAFGILNYFRDAWNIFDFVTVLGSITDILVTEFGNNFINLSFLRLFRAARLIKLLRQGYTIRILLWTFVQSFKALPYVCLLIAMLFFIYAIIGMQVFGNIGIDVEDEDSDEDEFQITEHNNFRTFFQALMLLFRSATGEAWHNIMLSCLSGKPCDKNSGILTRECGNEFAYFYFVSFIFLCSFLMLNLFVAVIMDNFEYLTRDSSILGPHHLDEYVRVWAEYDPAACGRIHYKDMYSLLRVISPPLGLGKKCPHRVACKRLLRMDLPVADDNTVHFNSTLMALIRTALDIKIAKGGADKQQMDAELRKEMMAIWPNLSQKTLDLLVTPHKSTDLTVGKIYAAMMIMEYYRQSKAKKLQAMREEQDRTPLMFQRMEPPSPTQEGGPGQNALPSTQLDPGGALMAHESGLKESPSWVTQRAQEMFQKTGTWSPEQGPPTDMPNSQPNSQSVEMREMGRDGYSDSEHYLPMEGQGRAASMPRLPAENQRRRGRPRGNNLSTISDTSPMKRSASVLGPKARRLDDYSLERVPPEENQRHHQRRRDRSHRASERSLGRYTDVDTGLGTDLSMTTQSGDLPSKERDQERGRPKDRKHRQHHHHHHHHHHPPPPDKDRYAQERPDHGRARARDQRWSRSPSEGREHMAHRQGSSSVSGSPAPSTSGTSTPRRGRRQLPQTPSTPRPHVSYSPVIRKAGGSGPPQQQQQQQQQQQAVARPGRAATSGPRRYPGPTAEPLAGDRPPTGGHSSGRSPRMERRVPGPARSESPRACRHGGARWPASGPHVSEGPPGPRHHGYYRGSDYDEADGPGSGGGEEAMAGAYDAPPPVRHASSGATGRSPRTPRASGPACASPSRHGRRLPNGYYPAHGLARPRGPGSRKGLHEPYSESDDDWC

SEQ ID NO: 10 - DNA, 5647 bp, Homo sapiens
gcggggaggagccggcgcggcggcaccgggcccggcacaaggcgcagcctgctcacgaggctgtggagaaggagaccacggagaaggaggccacggagaaggaggctgagatagtggaagccgacaaggaaaaggagctccggaaccaccagccccgggagccacactgtgacctggagaccagtgggactgtgactgtgggtcccatgcacacactgcccagcacctgtctccagaaggtggaggaacagccagaggatgcagacaatcagcggaacgtcactcgcatgggcagtcagcccccagacccgaacactattgtacatatcccagtgatgctgacgggccctcttggggaagccacggtcgttcccagtggtaacgtggacctggaaagccaagcagaggggaagaaggaggtggaagcggatgacgtgatgaggagcggcccccggcctatcgtcccatacagctccatgttctgtttaagccccaccaacctgctccgccgcttctgccactacatcgtgaccatgaggtacttcgaggtggtcattctcgtggtcatcgccttgagcagcatcgccctggctgctgaggacccagtgcgcacagactcgcccaggaacaacgctctgaaatacctggattacattttcactggtgtctttacctttgagatggtgataaagatgatcgacttgggactgctgcttcaccctggagcctatttccgggacttgtggaacattctggacttcattgtggtcagtggcgccctggtggcgtttgctttctcgagcttcgtgggaggatccaaagggaaagacatcaataccatcaagtctctgagagtccttcgtgtcctgcggcccctcaagaccatcaaacggctgcccaagctcaaggctgtgtttgactgtgtggtgaactccctgaagaatgtcctcaacatcttgattgtctacatgctcttcatgttcatatttgccgtcattgcggtgcagctcttcaaagggaagtttttctactgcacagatgaatccaaggagctggagagggactgcaggggtcagtatttggattatgagaaggaggaagtggaagctcagcccaggcagtggaagaaatacgactttcactacgacaatgtgctctgggctctgctgacgctgttcacagtgtccacgggagaaggctggcccatggtgctgaaacactccgtggatgccacctatgaggagcagggtccaagccctgggtaccgcatggagctgtccatcttctacgtggtctactttgtggtctttcccttcttcttcgtcaacatctttgtggctttgatcatcatcaccttccaggagcagggggacaaggtgatgtctgaatgcagcctggagaagaacgagagggcttgcattgacttcgccatcagcgccaaacccctgacacggtacatgccccaaaaccggcagtcgttccagtataagacgtggacatttgtggtctccccgccctttgaatacttcatcatggccatgatagccctcaacactgtggtgctgatgatgaagttctatgatgcaccctatgagtacgagctgatgctgaaatgcctgaacatcgtgttcacatccatgttctccatggaatgcgtgctgaagatcatcgcctttggggtgctgaactatttcagagatgcctggaatgtctttgactttgtcactgtgttgggaagtattactgatattttagtaacagagattgcgaacaatttcatcaacctcagcttcctccgcctctttcgagctgcgcggctgatcaagctgctccgccagggctacaccatccgcatcctgctgtggacctttgtccagtccttcaaggccctgccctacgtgtgtctgctcattgccatgctgttcttcatctacgccatcatcggcatgcaggtgtttgggaatattgccctggatgatgacaccagcatcaaccgccacaacaacttccggacgtttttgcaagccctgatgctgctgttcaggagcgccacgggggaggcctggcacgagatcatgctgtcctgcctgagcaaccaggcctgtgatgagcaggccaatgccaccgagtgtggaagtgactttgcctacttctacttcgtctccttcatcttcctgtgctcctttctgatgttgaacctctttgtggctgtgatcatggacaattttgagtacctcacgcgggactcttccatcctaggtcctcaccacttggatgagttcatccgggtctgggctgaatacgacccggctgcgtgtgggcgcatcagttacaatgacatgtttgagatgctgaaacacatgtccccgcctctggggctggggaagaaatgccctgctcgagttgcttacaagcgcctggttcgcatgaacatgcccatctccaacgaggacatgactgttcacttcacgtccacgctgatggccctcatccggacggcactggagatcaagctggccccagctgggacaaagcagcatcagtgtgacgcggagttgaggaaggagatttccgttgtgtgggccaatctgccccagaagactttggacttgctggtaccaccccataagcctgatgagatgacagtggggaaggtttatgcagctctgatgatattcgacttctacaagcagaacaaaaccaccagagaccagatgcagcaggctcctggaggcctctcccagatgggtcctgtgtccctgttccaccctctgaaggccaccctggagcagacacagccggctgtgctccgaggagcccgggttttccttcgacagaagagttccacctccctcagcaatggcggggccatacaaaaccaagagagtggcatcaaagagtctgtctcctggggcactcaaaggacccaggatgcaccccatgaggccaggccacccctggagcgtggccactccacagagatccctgtggggcggtcaggagcactggctgtggacgttcagatgcagagcataacccggaggggccctgatggggagccccagcctgggctggagagccagggtcgagcggcctccatgccccgccttgcggccgagactcagcccgtcacagatgccagccccatgaagcgctccatctccacgctggcccagcggccccgtgggactcatctttgcagcaccaccccggaccgcccaccccctagccaggcgtcgtcgcaccaccaccaccaccgctgccaccgccgcagggacaggaagcagaggtccctggagaaggggcccagcctgtctgccgatatggatggcgcaccaagcagtgctgtggggccggggctgcccccgggagaggggcctacaggctgccggcgggaacgagagcgccggcaggagcggggccggtcccaggagcggaggcagccctcatcctcctcctcggagaagcagcgcttctactcctgcgaccgctttgggggccgtgagcccccgaagcccaagccctccctcagcagccacccaacgtcgccaacagctggccaggagccgggaccccacccacagggcagtggttccgtgaatgggagccccttgctgtcaacatctggtgctagcacccccggccgcggtgggcggaggcagctcccccagacgcccctgactccccgccccagcatcacctacaagacggccaactcctcacccatccacttcgccggggctcagaccagcctccctgccttctccccaggccggctcagccgtgggctttccgaacacaacgccctgctgcagagagaccccctcagccagcccctggcccctggctctcgaattggctctgacccttacctggggcagcgtctggacagtgaggcctctgtccacgccctgcctgaggacacgctcactttcgaggaggctgtggccaccaactcgggccgctcctccaggacttcctacgtgtcctccctgacctcccagtctcaccctctccgccgcgtgcccaacggttaccactgcaccctgggactcagctcgggtggccgagcacggcacagctaccaccaccctgaccaagaccactggtgctagctgcaccgtgaccgctcagacgcctgcatgcagcaggcgtgtgttccagtggatgagttttatcatccacacggggcagtcggccctcgggggaggccttgcccaccttggtgaggctcctgtggcccctccctccccctcctcccctcttttactctagacgacgaataaagccctgttagaggatgcggctctctctgtccccttcctgtcctgccttcctgggtctcgtaccacacaccagaccctaaaccgcaggctgctgtgtgtggctgagaaggacccaggagtccaaatcccgtgtcctgggactcagcatccagcatgggtgcttggagccgttgtgaggagctctgcgtcctgtggggagcacccttcacgtggccgtgcggcacagagaagcagggcccacctgaaagtgcgccgagacctcgggacggaggggatggggagggggacacagtcgtggcttgtgcagcccgccagtgtcagcgaatgctcactcaggcaagctctgtcctccctggacaccgtcagccccacaggaaccgagctgggaagtgttcttgctgtggttgtgatttttaattgcaacacctctcattcttgtcacttctatatacgtgatgtagaaaaaatggaaaaccagaaaaatggggaaggaaatgttcacataactttaaaaaatcaaacctgtgaaagaaagatgtcagctttttgccacgtgtctttgtggcttatgcgaggagactccctgtgcatgtgatcactgtgctcctgttgcaaagtagaaggatgtgtattttgacactgacgttttgtctcttgttccccagcccccagcccatgttatcttgggtgtcgaatgtgtccattccatgcagaaccacagccatttccccaggcagtgttgggtcgagaatccacttttctaaacccacacagcctagctggcttgtctagactcttctaggcattggaattgatgaaaactacagggagcggggaaaggagacattatgtcttgttttcctgactttgggttttgtttctcactgtgtcttctccggctatcatatatgtcccctgaatctcatagtgagctgccaaatttgaagtgcatcacccagttgtctgcatctggaaccagtcaagcagtggctgtagtttgaacaagttatgtgtgcatgtaacatatatacatatatacatatatacaagtatgtgcatgataatgtatatcttcgtactttttgatacaatgtattcatttgttaatttttaattatatttgatataaatcaaaggtttgttgcaaaactttatatttaagaagtgttaaaaaaaaaaaaaagtcccaaccatgcaacacaactgggacctacttaaaaagaaattctgtgattgactagtttgctgcctgagtcatatttatcagccaaactttggattctgctgttgtttctacaatgacattttgtatgaagcaaagtccttgaattaaaataaaaacttagcaaaaaatcaaaaac

SEQ ID NO: 11 - protein, 1370 aa, Homo sapiens
GEEPARRHRARHKAQPAHEAVEKETTEKEATEKEAEIVEADKEKELRNHQPREPHCDLETSGTVTVGPMHTLPSTCLQKVEEQPEDADNQRNVTRMGSQPPDPNTIVHIPVMLTGPLGEATVVPSGNVDLESQAEGKKEVEADDVMRSGPRPIVPYSSMFCLSPTNLLRRFCHYIVTMRYFEVVILVVIALSSIALAAEDPVRTDSPRNNALKYLDYIFTGVFTFEMVIKMIDLGLLLHPGAYFRDLWNILDFIVVSGALVAFAFSSFVGGSKGKDINTIKSLRVLRVLRPLKTIKRLPKLKAVFDCVVNSLKNVLNILIVYMLFMFIFAVIAVQLFKGKFFYCTDESKELERDCRGQYLDYEKEEVEAQPRQWKKYDFHYDNVLWALLTLFTVSTGEGWPMVLKHSVDATYEEQGPSPGYRMELSIFYVVYFVVFPFFFVNIFVALIIITFQEQGDKVMSECSLEKNERACIDFAISAKPLTRYMPQNRQSFQYKTWTFVVSPPFEYFIMAMIALNTVVLMMKFYDAPYEYELMLKCLNIVFTSMFSMECVLKIIAFGVLNYFRDAWNVFDFVTVLGSITDILVTEIANNFINLSFLRLFRAARLIKLLRQGYTIRILLWTFVQSFKALPYVCLLIAMLFFIYAIIGMQVFGNIALDDDTSINRHNNFRTFLQALMLLFRSATGEAWHEIMLSCLSNQACDEQANATECGSDFAYFYFVSFIFLCSFLMLNLFVAVIMDNFEYLTRDSSILGPHHLDEFIRVWAEYDPAACGRISYNDMFEMLKHMSPPLGLGKKCPARVAYKRLVRMNMPISNEDMTVHFTSTLMALIRTALEIKLAPAGTKQHQCDAELRKEISVVWANLPQKTLDLLVPPHKPDEMTVGKVYAALMIFDFYKQNKTTRDQMQQAPGGLSQMGPVSLFHPLKATLEQTQPAVLRGARVFLRQKSSTSLSNGGAIQNQESGIKESVSWGTQRTQDAPHEARPPLERGHSTEIPVGRSGALAVDVQMQSITRRGPDGEPQPGLESQGRAASMPRLAAETQPVTDASPMKRSISTLAQRPRGTHLCSTTPDRPPPSQASSHHHHHRCHRRRDRKQRSLEKGPSLSADMDGAPSSAVGPGLPPGEGPTGCRRERERRQERGRSQERRQPSSSSSEKQRFYSCDRFGGREPPKPKPSLSSHPTSPTAGQEPGPHPQGSGSVNGSPLLSTSGASTPGRGGRRQLPQTPLTPRPSITYKTANSSPIHFAGAQTSLPAFSPGRLSRGLSEHNALLQRDPLSQPLAPGSRIGSDPYLGQRLDSEASVHALPEDTLTFEEAVATNSGRSSRTSYVSSLTSQSHPLRRVPNGYHCTLGLSSGGRARHSYHHPDQDHWC

SEQ ID NO: 12 - DNA, 2539 bp, Homo sapiens
agttctgcctctttgctggggaaagaaaccaggaacgtggagggttattactgcgggagaagggacacgaggatggctttgcttccccttgccccttcccacttttctaaaagctgtggagggatctagctggcctatgtctacactcagtgccctgagaagcctggaagactttctggctcttaactggggagtagtggagaccataggagaggactctcctccctcaccagctcttacgcctcatccagcaccactgccaccagggcaactgcagcagcatctcatgcataaccctgtggcttgcttcccccagggcagcacaggctaagtcaggaacatcggatgccagggagggaggagaaagccgaagcgaaaggggtcagggtgctgaggcaacagcagcaagggctggtctggacaagaaaagccatagcccggcagcccctaccatgagggagacagagaaacagaactggtggtgctggggggtatagccccccatccttgaggcctgtcacccacacagtaggtgctgagagttaggacaggtcaggaagtcccccagggtccacaaaggtgcctgaggctctggtaagggtgaagataaaagtatttaacaaccgctatggcatcaatgtaagtggagtttggtcctagtgccggagcccatgctattccaggcattggctctttagatgccagtcatgggggaaccctgagggtgtgggtagagtagcaggggccacctaagagattaaaaacagagtctgttttccaaccagtgtggaagcaattaaatatacgtaacagtgctacggccacaccagcacctcctggctgaaggtcagcccacactctggtccatgaggcagcaaggccagtgctgtgccaagcccggtaaggccaagtgccgaggcccagccttccctgccactcctctgagagggcagaacacacatatccaagtaggctacccaccactgggtagggatttctgtaaagatgggaaaggctgatagattgaaataagcttctgtgaaagtctggatttactgaggacctcccctgaggagggaccgttgggaccgcagattctgcagctggtgtggggttcaggtcagtttgtcaggatgctttaaggtgattagtaaatatacctcagcttagacttgggctgctccttctagcaaagcaggctccagtggggcctcatcatacaggatgacaagactggggccctgttcaccttgaacatgcccctgggccaagatggggcttcacccctccccagagtaagagctggggctgacagtcccaccctgtcattcctaatagcccaaacgcagaagcactgagcaagagagccctttcttgccaagccagtgctcttttggtatatggcatacagctccattggaggggacacatcactggctttatctggtggaaatgtacctttcccttaagttcctccttagtgccaccacagcaggtgaatgggtgccctacggggccctccttcccccaccaggaacagatggaacctgccacccaggatcctgatctgccctgcactgagcactcagtggataaacactcctccagcccagacacactcctcctcttgggcaggagcaatccagagttgttatttttcttagaaggagcctcttttccctctattttttaaattgaaatataatagctgcatcagccctgaaaagccaaattcaaccacatggctggagaatcatttgtcatggccccgccttctcttctgatactaatggagcttcatgacccacggtcagcccccaaaccaaagttgtcccaacagaggaggccagtgaggcagagacagagctctcccactctcagaccctcttttgtcttcattttcctctcccacttagcacatgtgtgcttgagggtggctgggaatgtgatatacagcaccctgatcctaacaggtgtgattgttacgtaagacgctgatactgggccttgtattgcttttaaagtttcctctgctcagcatcatttcatgccaaagtgctgctatgggctgctttgtgtgcacaaaattgctttttccacctcggaaatgcagctttccctagggggaggcctacaacaggacgaccattctgagccagtgagtctattgcatggtgttttgagaaagggaattttagtgacaccttatgccatttcaagaggagaaatgcaggctggcagagcaatttccagaaatggaatttgcctgcaaatagtataaacaacactaaatttactgtgccaggaaatcttcctgaactccttgaactcatacacacaggtatttgagtcctgaataaagtgttggaaagcactgcagatgcggtcacctgactgaccacctgggttttctattaccagtgaatttcttttattcaccttcccttgaccaagaaattgggtttcttttccctcagcctgcacttactcttctattaagaccagaaaataaaataattttccgttgagtcacaaactc

SEQ ID NO: 13 - DNA, 135259 bp, Homo sapiens
agcttagagttcaagctcaccccctgtcccttacagcatcaagaagggcactgtcattccccactgctcaggctggatctgacttggaggcaggggctggagcccaccttagcagaggacgggaagagggtgtgggctgggctggtgggtgcacagactttacgcaaactcatgcacgtgtgactggacagatctgggttctctccatctctccgaaacccttgctggggatgagcgatctgcatttttcggtcctgacttttgggaaactctccagatccccccatcctgcaggccctgagaagagcagcccctccctactgcgcagttctccttgggaccctgtatgcaggagagagctgatactccgtgccccgtggcccatcccaccgcctgctggccctgctcccatcccctcagcttcctccctcctctgccctctcgtcatctctgaattctcaggccctgccctctctgtgcccttccctccacctgacagggtctggctcaaggtcactgcagtaattccatacccagctgcccagggctgctgctgctaccgccaccgccttatcggccgctgggtttctgttacactcccttttatttctgggcatatcgtgttcgataaaaccctttgcttgtaacactgctggcagcgctcccagctgctccctcccgcgttcccgcgttccttcctttcctcctcccttctctgcgcttgggcaggcttcttcctttcctcctcccttctctgcgcttgggcaggcttcttcctttcctcctcccttctctgtgcttgggcagcctcaccttgtcccctcaaactccagagaaggaaaatcaaggtgcctccccatgtttctggccccgcccttccccccagcccctgcaggggtgtgcagagaatgcccaccttctgtgagaaaggtccaggcagggccgctgggcccacaccgagagtcccctcccagaggctggtgcccccacacaggccaggccggagggccagggcagccaggtccaggtagggctctggtgcagtcacagtgcccgactggttctgctagttccagcggccagccggtaggggcgtgtgctgggcgggctttggtgcacattatttcccatcttgactctgccacccccagccacgggttggggaggtgaaggcaggtctgagtcactagcaagggggagggcaggagttaaacaagttgtggccgtggcattcccacagaaggcccacgacccgctggaaggaaagagatagcaaacaaaaggtaggctgcgctgtgggccaggcactctccacctcgcccactcccacggtatcttattctctgggcccccaacaaaacctgccaaggcatgttttcaaagcgtggggctgctttgaactgagcccagcactggcggggctggggtggaaggagcgtggaatcgggtgcgagaggacagtctccttcagattcctgcttctggcagcctggggaccagttggggcacgggctgggatggagggtggagccgaaaggtgtttggtgggtgggggacagttcacgggtgaagtggaggctctgcaggcccagacagtgtgtgtgtgcatgcacacaccagtgctagtgtgggaggaatggtggtggtcagggaattcctcttttggtttctgaaagggcctttgggaggaccttgggcctggagttgtattcagcagatagcctggacctgtggctactggggggaattgggctggcccagctcttctccctgctggggtaccagaggtccactatgtgtccagcgttttggggctttggagaacccagactgttcctactctcagggagcttccattctagctgagaaggtgggactgagacagtaaagcaatccgatgaaataatgaccaaactgggtaacactgacaataagaattggattagtcttctggagtcctggatggtagtccaggctctgccacttacgtgccatatgatgcaggcaggtcccatcccctctctggcctcaacacttccatgtgtacgtgggggtggcatgcaggagtgttggcagtggccagaactctgaggggcagtcttcctcaaacgatacttgctctcttgccttctggcccaggtcatagcatttcttctgagccgccctcccctgacttgctggttcactcctccttactcttcccttgtgatcttggatctcagctctgtcaccacctcctctaggaagtctcccctgattttcctggcttgggtcttcctgtgcggctctgcactcccacactggactgtgattttctgtaccctctcaactgaacgtgggtggaccaaggcgtgtgttctgtgcctggcatggtgcctggctcagaaaaggcctccgggaaataggtgttgaatgcatcaaactacaaaaattaacaatatgagaaaagtgagctgaggagctaggaaggataggtcttaagctagatctcagcagaaacagaggcagtggccgagcagaagcaaggcaagcgggcattcctggaatcctgttagcgttcccccatgaggccatgcactcttaggtggggcttcctggggtcatcttggttccccatgcagcagctctgtgatctcggacaagtcacttaatattacagggtctcgctctgttgcccagtggcctgaccatggctcactgcagcctccaactactggcctcaagtgatcctcttgccttggcctcctgaagtcctggaattacaggcgtgagccactgcaccgggcccatttaatactctgagccccacctttcccatctgtggatggaggtaatgataatagcatctttggggtgtggctgtgaagatagatagatgagcatgcaaagctccaagtgcctgctgaattgtaagtgaaataagaacgtgtgccgctgaaggctgtccctggaggcagggacactctggccaggcctcatttagttggtcagtggctgagtgacccatgaggtaggcctctgcccctgagttcctggccctctcttcctcagccccatgtggaacccaaggatgcagctgctctgctaacacggcagcccatccttcaagactgtgacctcgccacagtggccctcagccctccacctccggcgggggcgagggccacccacctccaagtctccagccatgacgacctccgcactccggcgccaggtgaagaacatcgtgcacaactactccgaggcagaaatcaaggtgcgcgaggccaccagcaatgacccctggggcccccctagttcgctcatgtccgagatcgctgacctgaccttcaacacagtggccttcaccgaagtcatgggcatgctgtggcggcggctcaatgacagcggcaagaactggcggcacgtgtacaaggctctaacattgctggactacctgctcaagacgggctccgagcgggtggcccaccagtgccgcgagaacctctacaccatccagacactcaaggacttccagtacatcgaccgcgacggcaaggaccagggcgtcaacgtgcgcgagaaggtcaagcaggtgatggccctgctcaaggatgaggagcggctgcggcaggagcgaacccacgccctcaagaccaaggagcgcatggcactggagggcatcggcattggcagtgggcagctgggcttcagccgccgctacggcgaggactacagccgctcccggggctccccgtcctcctacaactgtgagtaagccccggtgtgtggctgggatggggaggtggcccgacttccattcctggctctgcaatccaagccatggttcataatacctacctccgaggggtgttatgaagattcagacataaggaatgtaacacgcaaggcgcaacacccggcacataggaggtgctcaacaagttagctcagataataacgttgttatagattcattatcattcgttagctgcctgataggatggcgcgatagtggaagcatgggtttggagtcagatagcattctatattctgcttcctccaagctgtgtgacctgggcaaccagttctctgaacctcagtttcctcatctgtacagtggggataagctcacctacctccattgtttgatctgagaatgaaatgagaccaggttcaggaacgtcctctaccctgcacccagacacatggcattccccttcatcccccttcctgagggcagcggctagacagtccctgactctcctgcccccagtcatgggggcttccaggatctgaggaatactcagaatggcccgccttccataaagcccttgacagtttgctgagggctttgaggttgtgacctcgttggactagaacctcctatccttgcacctcccttgcccccaagccaggacagggtccatctggaagtccaagagctggagtcagggcacctgggttcaagtcctgcttcaggaacctggtcaggggccctaagtgccgcctgtgcatctgctaaggagggactggagccgcccctccatccgggatgggttgggatggggaacttacagagtgcctggcacactgcttggcccacgggggcctcaacggccgttgttcccctcctctcagttctcttgagcctcagcttcctggcaggcagaggggtgtgggagccgatgggtaatcgtgtggtcacagagacatgatggtcattgcagcctcctcttcgtcaccccgctatacctccgacctggagcaggcccggcctcagacgtcaggggaagaggaactgcagctgcagctggccctcgccatgagccgtgaggaggcagagaaggtgaggccatgcagccccactgcggtggggaggggatgggctagggggagagagtgcctgggagccccttggccttgactcaggctctgtcacccaaagccccagtcctgtgcccaaggacagcacaagacccattatctctgtcggtttgtcgcaggcagggactgcctccctgcctccagtcctctccactgggcctggaaagggtggcgagtgtacaattaggggcacatgctatgtcttggggtgcctgctaccacctcatggtggagtgggtgagtgtgctcagacatattcctaggagacactgggatatgcttcccacccccgcccaccagctatccttttggggagacaaggacaggcccccgatatcatcatctttgccattacctctgtggatccaggaagaccaggcaggaagcagctgggcctcacacaggagggcctgaggaactctcagaggattcagaagcgaaagatcagtcttcctgacctttaaactgcatttcagatgcaggcagggagaaggccacgcccaccctgctgactgagcggcaaatggcccatgcacactgagggtgggcattagtgtctccatccccatgacccaggcaggcctatactgcccttctggtcccaaggtgggggtacagggccaagtttacccctctcttcctccgcagcctgtccccccagcctcccacagggacgaggacctgcagctgcagctggctctgcgcctgagccggcaggagcacgagaaggtagtgggccgagcccgctgggctgccggtgctgctgctgctgctggtggaggtgcttcagggcactaacagcctcctcccgctgtacccggtggccctgctgctcctaacctctcagctgcctcccaccctgcactctctcgactccagcctctggtgcacaggtccccggattcccgcctgagctgctcatgctcctaactctttctgtgccttctgcaggaggtgaggtcctggcagggtgatggctcccccatggccaatggtgcaggggccgtggtccaccatcagcgggacagagagcctgagagagaagagagaaaggaggaggagaagctaaaaaccagccaggtagggagtgggctgcggtgcttgggatggacagggcctaagagatggactgagtatttgtaaagagagagcagagcagtgcctggcatatagtaagcactgatgtgtttattcgatgaaataggggtgggggtgtagcagccctagtcccacattgcatgggctggtgactgagttaacagcaaagtgggatgcaaaaggttcctgattggagacccccggattcgggttctggatttgctgccacttactctatgacttggggcatgtcactgtcatggcctcagtttccccttctgcacagtgtgcttattggatagttccagctctgacatgctaggattatgtgatactgtcaatcaagactagggttggcctaagcacatggtgctgaaaacacctcgggctcatggacatattttctccgcatggggagtgggcagctgctgagtgcaaggctgccctccaaagctgtccatgccacgcccgggtgctgtggtctcctttccgtccatgttcactgtggccagtttctcttggacactgacctagggaggtaggctggttgaaaaacatctgcctttggccttcctgcccctttctgctggcctggattctatcccagctctgcctctccctggctgtgtgacttcaggcaaacccattccaccctctgtgcgctggctggctcatccataaaatgggtacatcatctgccctacctacctcacagggttgttatgaaaatcaggtactctgtggatgaagaaacattataaactgtaaagcactgtgcagaggtgagggatcatgaataggtatctgtggaatgaataaagagaatgaactggcattagcctgacaggtcagggcctgccctccctccaggccccgcccacttctgagccgcggctgcctctcccctccacagtcctccatcctggacttggctgacatcttcgtacctgccctggccccgccctccacacactgctctgctgacccatgggacatcccaggtgggcatgcagggctgcaagagacttccaggctggcccaagagcctcctccttcccagccacttgctgggccaagcacctcctcccaaaatctgagtgtcaccgggcaagtcactcaccaccttgagcctccgccgcctgtgggacaggctttcgtagtgagggctatggagaatgtctgaagggcccagctcctaggaaacgcagcaaaatgttctctcgctgcactcacttgctcagcacgcctgggaaggtggcctgagtcgcccacacctgcaggtcccagttcctggggtcacttgtcaaataggggctccagcctgctgggtggtcctgaggctgcaggccatctgtgacatggatcttctgcctcccaacttgggctgggtaactgggaagggccctgggcgagggataagggtgggcctgggatcatgtctatgctgttcccatttcaggttttaggccgaacacagaggccagtggatcctcctgggggccttctgcagacccctggtctccgatcccctcaggaaccgtcctgtcccgaagccagccctgggatctgactcccatgctctcctcctctgagccctggggcaggaccccagtgctgcctgctgggccccccaccacagacccctgggccctgaactctccccaccacaaactccccagcactggggctgacccttggggagcctccctggagacctccgacacacctggtaagaagagggccagagagtgtgagtgaggagctgggggacttccaggcagggccaaggggcagcagatactgtttgtgttaggaggacagcttctctggaaaggggtcagaccaacacctgccctttttgtcaacccatctcctcttcctctctctcttccgaggtggtgcctcgacctttgacccatttgccaaacctccagaatccacagagaccaaggaggggctggagcaggccctgccctctgggaagcccagcagccctgtgggtgagcagggcaaggggatggtgaggctctggggaatgaggggcccaccccgagcagcctctgtcctcttcctcccacgtcgggcgccaatccctttccccaccaattagctctagcatttctattccagagctggacctgtttggagaccccagccccagttccaagcaaaatggcacgaaggagccagatgccctggacctgggcatactaggggaagcactaacccagccaagcaaagaggcccgagcttgccggactcccgagtccttcctgggtccctcagcttcctccttggtcaaccttgactcgttggtcaaggcaccccaggttgcaaagacccggaaccccttcctgacaggtaagatatgcccttgtccctcaacccaggggctcctgctttcagagcctagcctccgccggaggagcccactcttcttcccaacttccacgacctcccggtgtagggctctgaaccccgggtcactcaaagccactctcgttctgcaggtctcagcgctccgtcccccaccaacccgttcggcgcgggcgagccgggcaggccgacgctaaaccagatgcgcaccggctcgccggcgctgggcctggcaggcgggcctgtgggggcgcccctgggctccatgacctacagcgcctctctgcccctcccgctcagcagcgtgccagctggcttgaccctccccgcctcggttagcgtcttcccgcaggccggagccttcgcaccgcagccgctgctgcccacgccgagctcagccgggccgcggcccccgcccccgcagaccggcaccaaccccttcctctgagccccgccccgtcccataccggcctgcgcctgcgccggacgctccgcggccccgcctccggacccggggctgggcggggcgccggtgctagtggaacgccgagccagtggcggctggtatcccgcggcggctctggaagctggacgcggaccacggcccgggagctagaaactgaacgcccgcataataaagactggaaccctcgttctcagctctcaccaagtggactttttgcggggtgtggcggccgggtctcgaccacagcgtggatcaccggctgtttaggaaactgcagctgcacaacgtggggtgcaaaactgccccgcttcctttacagctcttctcaaccctcacctccatcccccgtcacccaggcaccttcgcttccagatgctgccaggctgtcactcaattcggtcatttcattcatttatcacacatgggcactggggttgggctaacagcaagagacaataggcctttgttcctatttattgggtactgcttacgtgctaagcagatcagtttatttaatgcttgcaacgactctctgaggtagaaaatattgttaattccgttcaggatcccggctacataatctgtggggctcaatacaaaataaaaatgtaggggctccttgttcaaaatcgtatgaagaatttcaaaacagggacaacagagcatgaaaccaagcgcaaagcccactgcagtgcgattgcacaggtatctcaccttgcagccggcactactcccatttttcaggcaaggaaaccgtggctcagagaggttgaatggcatgctcaaagtcacaaagctggcatggggcggggctggaactcaagagtcagacagtctggctccaaggcctggagatcccaggctgggccccagatttaattcagcaaatattgactgactgctgtggacaaagtgctgggctcaccttggagggatccaacctccaggagctcgagcgcagcagggtagacaagccaggggcacgtgatgcggctgtggcagaagccaagtgcaggagctcccaggctcctttgttttactgagtcaccttaaatgtaactctgccctctcccttgcttcgccaaggctagcgagaaactcagtcttagccacacaggaggaatcggaccccttctgggggtttatgtggagtctgggaaaccaagggtggggtgaggcctggtactcaatccaggaggggcccctatgaccaccctcgcctgtttttcttctcaatgctccctgatcactggaccactggacactgatgtgtcctcagtgcttggggtctggctctgcaggcagcctgcagccagcctccatccccctttcagggacaaatggccttccaccagagtcggtgagtggagaggcacaatgccactccccttcctgaggtgggggtaggggaagggagtcccacaatgcagttacaaacaggatggacaagaacacctgctcaggagtcagacttacagggttcaaagttctgctccaaggtttgaccctaacaagaatcacttagtaataagtggttatgctctgtgaccttgagtaaattacttaccctctccatgtctctgtgcctgcgtttccttacttgtcaaacgggatcagaagtttcttccttgtgaggttactatgtggatgtccccaggcgtgtccattcagctcagagtccaccctcttcaaagactgaccatgaggcacgaacccatcatggctttcactcctggttttgccaggcaatacccagagtccagcacccatctattaatatcttctgctgcacccaaacctgggatgttccatccttcttggcccctgatccaccctttgtggccctgccacccaggctctcttcttctaaactggatccccccgaggactcccaaggggagctgttttgtttcccacaaaaaaagttggcagccttgcttcctgcctccctccttataagacccctcctgctaggaggttggtgccataagtcattctgtctcttccctgcctggggctgccactccacctcacttttgggatgcttcggtcttggctcatggtcttctcatccagctcttacctcaatttcaagtcgctccattatccaaggaccttatggccccttgacctctcaatgaccctcaccatggtcacacttggaggtttgtcatcaccccagattcctctacattcaaggcaggcttctggctctctgagcttaacctcattccttctagccagaacatgttctttggagcacccactggaccctccggctagccaacccttccaacaacccgccacaccccacattctcagagtcacccaggaccaccatctcttctatccttgatggcgtccaccactttctctcaaacgaatccttcccatcgaaatgtgtcttaattagctccatccatcttgacagtgtcttcccatctatcctctcatgtcaagcacccatcatctctctctgtctcccctccctttcctcttcctcctcagccgactcggcaacttctgctctcagcctgacttcactagaacgacgcccactaagcacaccaatggcctccatgttgctgaagccagtggacatttttctgtcccagccaggctggcccctcaggagtctgacatgtaggcactctgtccttcatctctggggtgctgtcctttgcaccctggctgcttcccttctgtgtctttctttctttctttctttcttctttttttgagacagagtttcgctcttgttgcccaggctggggtgcaatcatgaaatctcggctcaccgcaacctccgcctcccgggttcaagcgattctcctgcctcagcctcccgagtagcaaggattacaggcatgcgccaccatgcccggctaattttgtatttttagtagagatgggggtttctccatgttggtcaggttggtctaaaactcctgacctcaggtgatccaccctcctcggcctcccaaagtgctgggattacaggcgtgagccaccatgccctgcctccatctgtgtctttcacaggcttacttaagcctggacctgagccctcttctctgctcctctgcatggtctccctggatcagctccacacccacatggtctcaacagtcaagacccccaatcctctctcctgaagcctctcctctgtcctccaagcagtgtcatctctgcctccatgtgcacatctcaaacccacaggtcccacaatgaaccccatgagttgtccccccacccccaccccatgccctctcttgagggaacggccccaccttgcaagtcaccctggacaccgccttctttgtcgccgcccatcctgacgacgtttcctccttgaccgacttccagcccatccctttctctgcatctctgctcccccatctccccctgggtgctgctatagcctcctatctgcccctgctttcactcttgcccctttccagttcattctccactgggaagctggtgggatctttccaaaacgcagatctaactggtaaccctcctgactaaagcctttcaatagcttgcttctactgtcatcaaaaatccccttctctggccaggcacggtggctcacacctgtaatcccagcacttcggaggctgaggcagatggatcgcttgaggtcaggagtttgagaccagcctaggcaacatggcgaaaccccgtctctactaaaaatacaaaaattagctgggcatggtggcgcgctcctgtagtcccagctacttggaaggctgaggcacaagaatcgcttaaacctaggaggtggaggttgcagagagccaagatccactgcactccagcctgggcaacagagtgagactctggctaaaaaaaaatggggtcgggtatggtggctcatgcctgtaatcccagcactttgggaggccaaggcagatggatcacctgaggtcaggagttcgagaccagccttgaacccaggatgcggaggttgcagtgagccgagatcacaccactgcactccagcctgggtgacagagcgagactctgtctcaaaaaataaaaatccccttcttacagttcacgagtgtctccaagatcttgcctctgccctcatctactgcctgtcttccctctttctgcagttgctcagcccggactcactgacaagccacgggacctttgcacaaactgtacctctgcctccttccccagcactccccctgagcaccctccaagttcctttctctcgttctccatggcttcacaaatgtgatttcctcagggaagccttcatcctttgccccttccaccagatcaggtcacttgttacgttataccctcacggacttgtcacgtgggtgtttatcggtatggctgtcgaattagcatctgccgctctcaacagactgtgagccatgtgagggcaggagccttgtttctctctgcccaccattgtatactcagtgccttgcagagtggcaggcggcaggcacttaataaatattggctgaatgtagccaatgaggccatgtgtaacctatgagacataaaatgggctcatcagtattatttaaggaagacttcctggagtgggtaggatttgagtaggacctagagacgaggaggctgcaaaaagcaaaccttgttagctggtggacctggccaaggtacgccttcgccttggatctcatttctcatttgtaaaatgggcaggggttggacaaaatgagctgaagctctggcatcccatgtccctagcatctcccagccctagatcccacaactctccctattcccttgagaagggctgtcctccccaggcaggggcagagcccagttttatgcacagaatgggtcctcccaaggctcgggtgcctgatctgcaattctgcgctccgccgcagggcgacgctcggagaccagccacactgtcccaagtcccggcgaagacccgcccgcggctccgtaggtgcccggcccgcccctcgcagcctcctgacttcccttcctgtcctcagcggccgggcccacggccccgagcagccatgctgggcgcgcgggcctggttgggccgcgtccttctgctgccccgcgccggtgcaggcctcgccgcgagccgcaggtacgggcgggcgagcgggcccctagggcactccctgcgcctgcctgcgggcccagtggagggtcttccggacaccggtccccagtgccagtctggaccacccctgcatgcctggcccttcccccacccccacctccggtctgctcctgagacctggctctggctgtaaggccctcctcccctcctctcccgtcctcatcccttccctcctctccccttccttccagtgcagtgccagctcctcagggactgttctgacactgcttccaggaagccttccttgcaccccagtgctggatgctgggtcaagggcctttctccaatagtaccctgtgccctgtcacagtcctttattgctgcatggacctttcgttatttaggtctgcctgcagtcccacttccaggctgaactccctgaggtctctgattccctaggtgtcctggagtctggcccaggacctggccccacaggagtcccagcaggtgggcgctgagtgagggagtccccatgtctggtttcctctgtttgtccctcacctggtcgagtcccagaccctactgatcttggcctgtccagccaccaacagtaggctgccttccagtggggccacacccaggcctgccagagagatgcctccaagcagctgctccaggaagggccgggggaggggcctggggaggggtaagaatggagccccaagaaccattctgcccattgtgacccgccctgacctcacagccatccttcccaccgccaggcccaggaggttgggggagactaacctggcaaggagcccccaatgagccacctctcctcaccccccaaaaaacataagggggagcacaaaggccacagtctcccccatggttcagaaaggtgggttgggctgggagcaggggtcctactggggtgctgagtgaaatggagcaggtgctggggggcctgggagaaggtgggtggaggcccctggcttgcctgatgcaccagtcctcgccaggggtagctcctcccgggacaaggaccgaagtgcgacggtcagtagttcagtgcccatgcctgctggagggaaaggaagccatccttcatctacaccccagagggtccccaaccgcctgatccacgagaagtcaccatacctcctacaacatgcctacaatcctgtggactggtgagcacctctcctggggccctgcctggaatcgctggggtcctgggcccctcccagaccccctgggctactgagtgatgccccaccctgctgggtctaggtacccctggggacaggaagccttcgacaaggccaggaaggaaaacaagccgattttcctctcaggtaatgctcccaccttccctgatgtgggggtgtgggcagggagtggcagtggatgggggagggtcctctcggcctggcgggtcttccaggagactagaggccaggacgtcttccatgtagccagggccacttggccagcctccctctgacccgttgctggccccctgacctctccccatggccctgttcagtcgggtactccacctgccactggtgccacatgatggaagaggagtccttccagaatgaggagattggccgcctgctcagtgaggactttgtgagtgtgaaggtagaccgtgaggagcggcctgacgtggacaaggtgtacatgacgttcgtgcaggtgagcagccctcctcgggagtgtatgcgccacatgggctcagagcagctcccctcaccctcgccctctctccgccaggccaccagcagcggcgggggctggcccatgaatgtgtggctgactcccaacctccagccctttgtcgggggcacctatttccctcctgaggatggcttgacccgagtcggcttccgcacagtgttgctgagaatacgagaacaggtgggtgtgcctccgggagttgggggaccagggtgggggactaggaaacaagagcccctccccctagctgacctccaggtgtgcccccacctcccgcagtggaaacagaacaagaacaccctgctagaaaatagccagcgtgtcaccactgccctgctggcccgatcagagatcagcgtgggtgaccgccagctgccgccctctgccgccaccgtgaacaatcgctgcttccagcagctggatgagggctatgatgaggaatacggtggcttcgctgaggcccccaagtttcccacgccgggtcagtgccccacgcccgccttagcccaggctttggccttctgattcctatgctggtcagggacctactggctcctggcctcacccatagcttcctgtcctcctgactggcagtgacctccttgcccctagcctgtcggtagctatcggtgaagacccgactgctggtgtcagcagtgaccctctcaccttaacctagatgatgaccttctgtcccctgacttggtcagttacccagtgaccctgacttggctaatgacattctgggctctagggggacaagtaacttactggtcctctgtgaaccaatgatattctgacctctggcttaggctattaccttctgtcctgtgggttgactcttgacctcacagcctgtccagagactgcctgttgagtgaactcccagcctctgcctggcccaaggcctcctgaccaccccgatctctgtccccactttcccattctctcacctgcatgttcttggtgcccccacagtgatcctgagcttcctgttctcctactggctcagccatcgactgactcaggatggctctcgggcccagcagatggccttgcataccctgaaaatgatggctaacgggggcatccgggaccatgtggggcaggtgacgggcactgggtgttccctggaggggcagcagggggctgtggggtggggcagaagctgggactggcctccagctttgtatccgcacagggctttcaccgctactccacagaccgccagtggcacgtccctcactttgagaagatgctctatgaccaggcacagctcgctgtggcctattcgcaggccttccaggtgacccctgaccccagcccagagaacaggcatctcactctggctgcccctcccaaggccttcctggtgactgtggcttctcttaatctgaatcccctgttccctcccatgtacccactacccaggcttccctcccccgcctgcctcagagaatgttgccaccttccacctgggcctccccagtgacctctctgttcacagtctcctttcttccctttcttagctctctggtgatgaattctactctgacgtggccaaaggcatcctgcagtacgtggctcggagcctgagccaccgggtgtgtgtccatggtggcaggcaggcctggctgtgggaggggttggggcctccactgccctgtgggccggggccagccaactctcccctccccacagtccggaggcttctatagcgcagaagatgcagactcgcccccagagcggggccagcggcccaaagagggcgcctactatgtgtggacggtcaaagaggttcagcagctcctcccggagcctgtgttgggtgccaccgagccgctgacctcaggccagctcctcatgaagcactacggcctcacagaggctggtaacatcagccccagtcaggtgaggacttctggggtcacctgacgggccctggtgcctgccaggcgtgtgagctcgcagacaaaggccattctcctcaggaccccaagggggagctgcagggccagaatgtgctgaccgtccggtactcgctggagctgactgctgcccgctttggcttggatgtggaggccgtgcggaccttgctcaattcagggctggagaagctcttccaggcccggaagcatcggcccaagccgcacctggacagcaagatgctggctgcctggaatggtggggcagcacacctgagaccgagcctgtctgtaggatcccccttcacaaagcccctgtctttccggcagcggctaaatgctcactctcccttgattagcgttattattctcagttgacaaaagaggcttaaggagcttgagtaacccgcccaaggtcacgcgcaagggctgggaaccccgccatgtctggctttggagcccaagatcttagggatcacccatggctccagggaggtgttggggcctaaggtgatagggtggacatgcctggagggtcctggccagcttcttaccactacttgtctctcctggctccaggcttgatggtgtcaggctatgctgtgactggggctgtcctgggccaagacaggctgatcaactatgccaccaatggtgccaagttcctgaagcggcacatgtttgatgtggccagtggccgcctgatgcggacctgctacaccggccctggggggactgtggagcacaggttgggggctgggtagaccgggagggcccgtctccccaacgcgtccccagcctacctctgccctacttctcccctccatgtggactccagtcctggctctgccaggtgcttgctgtgagtttgtagcttccctgggcccatttactcatctgggaagtgggctgatggcacctgcccaagagggttcatctggagggttaagtgaacaaatgcgtgaaagggcctcctctgggaaaggccctctctcctggggctctccccagcccctcccgtaatgcctgtcccccagcaacccaccctgctggggcttcctggaggactacgccttcgtggtgcggggcctgctggacctgtatgaggcctcacaggagagtgcgtggctcgagtgggctctgcggctgcaggacacacaggacaagctcttttgggactcccagggtggcggctacttctgcagtgaggctgagctgggggctggcctgcccctgcgtctgaaggacggtcagtgggggtgcagggctagtctggggtcctgggaggtgtaagtgcagcgtgggtgaagagctggtgtgggcaggagccctcctggctttgtgtctctgctacttattaatggcgtgatttttggctgctgtaatatttctgtgtctcaatttcttttttttaaatagagacagagtcttgctatgttgcccaggctgatcttgaaatcctgggctcaagtgatcctcccacctcggcctcccaaagtgctgggattacaggcatgaaccactacactcagcgtgttttgtttcgttcctttcttttctttttatttcctttctctttctttctttctctttcctttcttcctttctttcttttctttctctctttctttctcttttttttttttttttgagacagggtctcactgtcacccaggctggaatgcagtggcatgatcttggctcacagcaacctctgcctccggggctgaatcaattctcccacctcagcctcctgagtagctaggactataggcatgcaccaccatgcctggctaattttttgtagagatgggatttctccatgttgcccaggctggtctgaaactactgggctcaagtgatctgcccacctcggcctcccaaagtgctgggattacaggcgagagccaccatgcctggcctgtttcttaataagtaaaatggagctaacattggtactaccttacagggttgatgtaaagatgaatgtagctgttctgtaaacatgcttagcacagtaactgacacccatggattcagatattgaccaaggctcacttggtctctgccctcatgaagcttacagtatggtaggggagacagcgaaaatgcagtaatgatgcaaaaacacatgcacaaatgtgcagttaaaattgtggtgagtgccatgaagaagtaggacgctctatgtgtgcctgctccctatcacccatgtgccttgtctgtggttaaaggtttctttcccaaaactcaaattttagctcctcaaagatcaggactttctgccactgttgtatccccagggtctagtgtggttctggcacattgtaagtgcttaataaatgttaactgagtgaatgaaagggccttgggagagaaccacagaggaggaccaactcagcctagggagagattagaggacacctgtgacaggtgtcatttaaccaaggcctggagggaaagaggggccatgtggccatggagaagctgtggagagagttcaggcatagggagcagtgcatgacaggcctggtgcaggcagcctgtatcctggaggacaggcagggcccgcgtgttccaggagggcaccgaggagaatgctgaggccggcagggcacggaagccgtcttttttttttttttttcctaagaaaagaaggctggtctcaaactcctgggctcaggtgatcctcccgcctcggcttcccaggtgctgggactacaggtgtgagccaccatgcccggctggcaaggaggttttaagtggattgtgatctgctctggtatggttttaaggaggtcactctgaccactgatggagagaagtgggggtgggggaaacaggcgaccagttaggaggccattactcgtgttcagtccaggcaggcattggtgaaggctcagaggatgtggaagtatgagatggggagacatggtgagatttggatctcttctggccacagccctggcaagactcacagatggattagaagcggagggagagggagaggaaggggacaggatgatgccgctctagcttgagcagctgagtggctggacagaggcatcagcagcgaggagggagcctggagaccaacagttgaggctaggacaggtagagtggagggtgccataaaaaagacagcaaagtactgataactgctggagtggcatccacacccagagcggggaaggggcaggatgggcagggccttttctctgtcccgtcccccaagtggccctggatacagtcctgggcagggtcctgggactcagtgacctgcccttacccccaccccctgcctccctatgtgctgtagaccaggatggagcagagcccagcgccaattccgtgtcagcccacaacctgctccggctgcatggcttcacgggccacaaggactggatggacaagtgtgtgtgcctattgaccgccttttccgagcgcatgcgtcgtgtcccggtggcgttgcccgagatggtccgcgccctctcagcccagcagcagaccctcaagcaggtggggggtgagggcatctgggctgggacctcgggtaggagggaagttggggctgcgatggcagatgggaacagggggtggggttcctgggctgtccccagagctcaggtctgtgtgtgtgcaggcacgtggcctgtcagacagggaggcagaagttaatatgagtccgtggtggctgatgaagtgtttctctgtacgtcttggtgtcagtgtaattgcttctgtccatactgtgttactggtgtgtgtgtacttccgggtgtgtgtgaccctggaggtgtgtgtctgtgcacctacctttgagggggatgctggtgtgagtgtttgtctgtctgcatgtggatgccccatctgcaggtttgcctctgtgtctgcctgcatgcgtgtgtgtctggtgtttgtgtgtgtggtatctgcctctgtgtgggcatctactgtgtgtgtgtgtgtgtgtgtgtgtgtgtgtgtgtgtgtgtgtgtgactactctgtgtctgtctgaatgggtctctgtgtgctctgggtcttctgggtgtgtgtctccccatgtttgtatctgtaccattgtgtatatgtatgacatttccacttcggtattctcatgtgtgagtgtgtgtgtgtgttcccacttgccaagcattaactcatcctggcagctgagatgagtccctgttccttcttagagatatacggtggggcggaaggaggatggggaagccctggtggtctagggctcagccctccctcccctgacacaccggagtgacctttctattccggtcagatcgtgatctgtggagaccgtcaggccaaggacaccaaggccctggtgcagtgcgtccactctgtctacattcctaacaaggtacccatccctgtgagcccaatctgccacctccccagagctgccccctcccatcctcagctcctcaacatctccttcccctcagaatgttgggaagagggaacttcccagtgggcctttctaatgggcaggtgaccccaccccggcaggtgactctccctgctctgctgctgccctaggtgctgattctggctgatggggacccctcgagcttcctgtcccgccagctgcctttcctgagtaccctccgacggttggaagaccaggccactgcatatgtgtgtgagaatcaagcctgctcagtgcccatcactgatccctgcgaattacgaaaactactacatccatgactgccccaacccccttggggtggggcagaaggtgaagcatcccaactgactagagactcaggccctgcagggccctatagaacctgtggccatccctgagcaccctgccaccaggtgacctcggccatactcactgccccccttgggcacccactcaccctagaataaacttaacagtgtcccgtggtaacctgagggcctcagctttgcttatgagggagggactgggaaccagcagctcagggccacttcctctggcagcccccacctgacccctctgccttctcccatttctccttcatcttccaggggtcagcagactgcccctttcccttccatggtcattgtagcctgaatgaatttagtcccctgaactgaggtcaggggactaaaaccaagtaaagatgcccaggggtgggcatgggggtgtggactggcccaggagggagaaagcacaatccttgccctcagaaagaggttaagaagggaacctgccctcccctccccattgtctccttgtgttgagctggaaagggggcagagatgctttatatgagcttttatatttcacagaatggtgactttgcatatgccctggtgcattgtgggagctgctattgtcacgactaagacatttcttttggggtatccatctagccccagcctcgaaaggatggaagcagggcctccttgcaggaggtcatgttgtccatttgtctgctttcatacaagctggtccaaagaaagagttctctttcgtttggaacatctgttgggttggaagtccttccccaaatctatctgagtccttcttgctgcagagaaagccttcctgtgacctcatcctttcccctaaatgttgggaaatgctcctgagtcctgtccttgacacatacatcttccttgggttgagggatggggactgggacacatgctttgggaagggcaggtgcagagtgatggggctgacggggtgggggaagcagggggaggagctgtccctctgaggcctttgggaatcggctgtgccaggcatcctcagccctccagctaagcaacacagagagccaaaagaggctactagagacaagaaggccttcatggggccactgcttgtgggggatgtcagcagtggggaggagtgaagcaggaaggaaccgggagactggatggaattgctcccttcacacggtcacacatagccacacatggtcactgggaccagagtcagctctgtctgggcagccaggccctcagtgcaagccaccagcccatctggaggggattagtgctccggccaacaaggtcagctggccccttcctagctggagcctactcaaccttgccaggaagtcagagagctggacaagtggagcccagcctggggaggtggaagagagggaggatggagcatggtgaagcacaggtggcctttttggcagccccagccctggctttggaacagtctgggcagtgtgccaacccctcttgccactgtcgtcccattgaccctcatgaatgagttgcgaggcagttaccttcagcctcctatggataaatattcgaggcccagagagggtaagagacctgcctgcgacccctcagcacttctgtttctctctggggtcttgagggtacaataaagacccctaaggcttcctcttctcgcaggaggtccaggcgcagctgtgggggagggtgcccttggtgtcttctgtccctgcagccagtctgctttctactcggcagctcctctctccctcctgggatgagatgtgcacgcgatgatgggattctgtaaatgggttgggaagaaggagttacctccttaaagggttagttctcccaggagtgctcgaatttctaaagggggcagggtcccacataaatctcactcagaagcaggattataagagttcctgcagcatcccttcccctttgctggtccctcttgagtgtgcaccctgttctaccagcggaacacctgcgggccagggtcactggagacagggccataccgtctgggcggtcacttaagtaacttcatcattctgagcaccccccttccttatctgaaaggtggggggccatccacccagctctcagggctgttaaggtgactaaatgggataatggttgtatcatccctgagcaaagggtatcacagatgggaagattatcttagctccgcagggagccagatgggctgtgagggaggggtaaaggcagggctggagggggctggaggggctggctgagcagggtatatatggggggggttcttcctcaaacccagaaaaactcttagttaggcttagtgtctttgttgagaaactgaggcccaaagaaaggaatttcttgtccctttgtttccctttccctgcctgaggtcattcattcacctaacaactttgtgcccgacactagacaaggccctagtgagcaaaatgaacatagcccctctgggaacacagagcctagatagggagatgatcatttcattactgcaaacacaaacatataatcccagcctgggctaagtgctgtgaagttccagacttgtgtctggctcggtgctgtatcctaagcaccttggcacttaagtggcattgaaatacttgctggaaagaaggccactctgaggaggtgatgtcagagctgaggcttggagggctggagttaaataaagatggtttcaggtcttctttgccttccctgtaggttctgcctctgcctcctctctggcactcaggctaagggtaagcatctccgactggccatcagccccaacatgccgagtacagggatcagatcctgtcttgcgtggccggtctcccctaggtcctgaacccagggaagtgcatgtggatctcaatttatctagatggtgcgtttgtgcctgccctcctttcgggcatgttctagaacagagttcagtccagagcccaggggtggccgggatgatggatgagggtgtggggcctgctgaccaccaggggacctgatcattgggctgggccagcctctctgtcctcattttcccctctgcaaagaaggggtgttgggcgtccctacttctcgcgccagccccggggcctctatcctggcgggaagggcaggccgacccggcagactgcggcctctcgggagggaagaaggtgtcagacgcgcggagcaaccataaatagcccccctttcccagaagacggcacggggttcaagactcaggcgccgcatactcagaatgagagcagagactcccgccaggaaaaaaaggcacttaggggatctgctcattagcatgaaatgcaaatgagcccgcccggcctcatttacacaactctgtgcatggattcggcgaaagggcaaccagggagacgacggcgcagcagccactctgccacttcccccatcccctccccccatcggccggggcgggaactgagacgaccccaaccctctgcggtggcgggaggtgcgcgggggctgcgtgggtggtgcagccttaggagagtgaacaacgcccaggggtgatggcctcagcaaagtgaggggtggtgatggaggtcatccgacccatcccgccgcctctccgcagtggcgcaagcgccccaaaatctccggagagggaactgactgacccactaggttccgccgtgtctacctctcgcagatgttggggaagtgcttcccggcgtctaatcctcgctgttcccccctccaccggcgcccagcacacccgcggcgctccgctcccgggtacccacagctttctggagtggcgccggcggcaggagagagctagagccgactgagccccagaactcggggaggtaggcggggcaagggccggggtctgcgcgtgcgtgtgcacgcgtggaaagcacaaacccacgagggcccgctgccggtagggttaaggtgagtgagtgaaggcggcagacccgcgaagttccagttccgcggacactccttccctaagccacatagggacttaagagaaactgaggcacgaagttggggggtggcggtggtggggactttgaaggtcgagtcgataaagcccagctctgtgcttccgccccctcccacacactcgagacccccacaggttccttcttaggggtcctcgctctgctccgcagcccctcctggggatccgggctctgcggtccagcgcgacctgcctggggccacgtgttcaagcacgaagcccctgcgtggagtccacgcccttcaaaaggtccctaggggcaaagggatgaagcccaggagcgtcaatgtgaggtcaggtccagcgggttagggttacgaggtcagggtcgaagtctcagaattgactcgggagtatgaccaataagcccaagagatttgtggaggccacgcccagaccatgcctaccctagcctttctcgagctccgcccgtttctccaagactgggcccctccagcctgaagccccacccccaggacatccagctccgctccttcccttccccagtcccgcagccaagctcaactccagggtgggagattaaccaggtggagacctgggatttcgctctgggaccccctggtgacaaccctcacccccgtgccgcctgtctcctttcttccccaggcccgcccagagctgagctccgtcctccggctgctgcccaaatcaggggtcgtggacaaaggatgcctggggcctgcggccctacgccaggaccccgcgccgaatactctgattcttcgggctccctccaagggagtcccaaagaccccaatggccaataggaaagtgggttcggtctgggcagcagtctgattggctccagccttcgggagcggacccaggggcaaggggaggggagaggggcggtcctgggttttggggtgggaatcggattccagctgtggttctctccctgcgctcccgcccgcactgccacggcggacggccaatgggcgcgcggctcggggccggcggcgtccggcgattggctgcggggctgtctgggggcggggccgaggcttgaagttgaagtgagggatccagctgtggtgtgcgcggggctcctcgccgccgctttcgctcgctcgctccgcgtctcggccggaggaggaggctgtggcgccggcgacagctacggcagcggcagccaccgcggcggctgcggcggcggcatctccgcctccactcccgcccgggactgccccccactgtctccccgcccctcccggacagtgagcccgcggcggggcgggggaaggagccgcccccaccccctccaagcccacccctaaagagatccctcctcccctcccccgccgcctggcgcggagccgggacgatgctgaccccttagatccggctccagctgcgccgcgggaagagggggcgcccctccccggacccccgccctccgccgctgccccccttttcgttcgccctctcggggcggcttcgccgaaggtagcgccgaatccggcaaccggagcctgggcgcgaagcgaagaagccggaacaaagtgagggggagccggccggctggcccgggaagccccaggggcgcaggggaagcgggactcgcgccgggcggggtttccctgcgccccggcgccccgcgggcagcatgcccctgcgggcagggggagctgggctgaactggccctcccgggggctcagcttgcgccctagagcccaccagatgtgcccccgccggggcccccgggttgcgtgaggacacctcctctgaggggcgccgcttgcccctctccggatcgcccggggccccggctggccagaggatggacgaggaggaggatggagcgggcgccgaggagtcgggacagccccggagcttcatgcggctcaacgacctgtcgggggccgggggcggccggggccggggtcagcagaaaaggacccgggcagcgcggactccgaggcggaggggctgccgtacccggcgctggccccggtggttttcttctacttgagccaggacagccgcccgcggagctggtgtctccgcacggtctgtaacccatatccttcggggcacgacggccaggcgcggggtcagaagggggacgggccgcaccgccgggggtcgggggggaagaagacccaccgccaggtgagtcgaagtgagcccggagggtaggcggatggggggggggctgccagggaggggagggggcaccagagtgggagcggagacgcgagcaggtctcgtcggtaacccgggcttaccccacctgcgtacacacacctcagtcttcctgggttgggggggtggggatccaggccaggagaagagagctgtgccccgctggctcgcagctggacgccctccagatgtggtcaggggagggtcgtcatcctccagatgtgggaagcttcgggagcctgggagctgtactctgcccgcgccggttagcgagctgggtttggtttccgagtttggtggggggtgggtgggggcggtggggaggaagctgcggggacggaggaggggggaccgcaatctcctgggtttccctccttcccccgccccaaagtttgcggcggattctagggtctgatcccccaacctggtccttgaggctgaggtttttactgacctagaaggagatgttggggggcggggaccaggtcctggcccacctcaccccccacctcgcgggttggaggcacaacaaggagattccggcggcggctgatgtcaggggcgcagaatgagaacaagatgtggtggaggggagctgtctgcccccggagctgggagtggagcccctttccgctagagcccagtgccgcgggtgcctcctacccgatctccattcgatgcagggtgcttaagattgggttggggagttttatgctggatttttcttgtggagggaaagactgtgtcaagagcttttttagcaagtgggggatggggttaagctggtccaggttactcctcccctttcacaaataaagagtgctcctgcagaccaggtatgggggactgcaggcccgcgaaagtcttgaggggacagtaatactgtcagtgtgttcactaaggaggactcgggtccaccaccccagcgtagactccgcagataggtttggggaatgcaagccccacattccagggagatggatttagcactgctccctgtctgcccaggctggagtggtaggggagaccccagcccagtcagaccctagctcaaagcgccacttgacagacgcctggccccaagctccctggcgggtcctgccaccgggggaaggaaaggtggaggggaggtgttgctgccatctcaggtctggacagcttctctgggctccttccttccagctcagaggttcttatagacccagggtgggagaccccaggtctcccttgtagcccctgtgagcctagcagggactctgctttggggaaggggggtggaaggttggtgccgccctcactctctgcagctctgctgcctctagtgcgcaaagcagggatgagcttgtggcccccccacccccatcctctacaccttgtgggtctttaggaagctcccctcatcacatcctcttctcatccactgccccttcttcctttctctctgagctgcagaaagagaggtgcaggcctcagaggtctgtgttcttgctgaataggcacaatcttgaggtttgagcccccagccccaggcccctttctcccaggcagggatggagatggagaactgatatggctggaaaggatgggttccgagcaactctcctctctgcccctaatcatttaccccttccacgaatgggaaaaagcatcaacctctatgtcctccttctcaagggtcccaggggaggtagagagagctcttctctcccctctccctgaaaacagacctctaggctagcatctcttctcgcctgccctatctccaggtgctagtggagggtctggaggcagactccttcactgagtggtctggacgggggcaagtgttgaggcctggcatgggggaggagaggtgggaggacagcactcaccttgggagttggggagcagcttcccccaggggagtggtagttgggtgtgtggcatcagcattactaggtctggagaagcctgggttggctgaggatgggttgagaacaattttttggcaggggactgcctaagctgtgcccctcaccactgccatcctacccaagtaccaagagacacctgtatttttgctgccagaggggctctgaactgcctccagggcctccctctttctctttgtggtatctgtgactccccacaggcttcaggagggtccctgtacgcctctgagccggagggacataaggacactcccctccacccccaactaactgaagctagttaggcttttcttggtacattctgcttcttggcctctcctttttaagggaccaggtttcctagagaggagatctagacccaggtaggaagtgtgtgtgtgtgtgtgtgtgtgtgtgtgtgtgtgtgtgtgtgtgtgtgttgcaagggaggacagcaaaaggctcagaagtgcaagctttggtgtggagagcaggggtactggcagacagtcacccctgcctcagatcagaggggagcatgctggcctttccagtatgtgttcctgcaagtgtgagggagcgcgctcccctctcggggaggagttcctccgcattccctctctggctgttgtgtcacatctggaagtttgtgtaggagtttctccaagctcagagcccagcacagctttttctcatttggaaatcacaggctggcatttgggatgccgagagagggggagtgggaggggggccagagggggaagaggggagcctgccaggagtcgggggaggagaggggggggaggcctgaacggcaggagccctaatggcttccagaagtgagtgtgagtgagtgactgtgcgtcactctgtgtgtctgagtgtgtccctctagaggggtgggggcacaggagtttctggagccttccttgccacactgtcccaatgccccaagtctgcctatttctcttacctagggagaattctccatttctgtcctcagaggaaatggtggggggagtgttcttcctgtctcttcatcaattccctcctccaatttaatttccaaaccctaagctcaccagaggagattctggggagaagggctggggctggagaattgaatgggattgagggggggccagatcaccccttggcatgctttctgccccaggcccactttccttctgggtcacacacacattccttcccacccgctctgctccaccgctctgctgggggactccccatcacccgtagtgccagttggagccattcctgggattacccccaccacacagccccccccaccctcgcctgctcccgcccagcactcaccccgccctgcctgcctcagccaggatggcgacagacacaactgctcacacgcagacatgcgcacgcgcgcgcacacacacacgcacacacacacacagagtcacagacgtttgaatcagatttctggcctatttccccttccaaagattccagcgggccgtctctcttgtgtctctgtgtctcatgtctctgtctctgggtggagccggctgcctttctgtgagcttcagttttcaattcagctggaagcctctctccccctacacccatgcactgaagcgtggtgaggggggaaccacagggaaataggcttgtggggtgaggggggggggttctgctgggggaatccccctttgagctttggagcagggcggagcccctacatcccatgttaccctaggggttgccgaatccgatagacaccaggagcctctctgtgggatgggtgaggcaaggacctatccccctacctcctcatttactagaaggccaggactcctgggtccaggcccattttctcctcaacgttccttagtctcacatttccaggctcctaggtgggaatggggccgctggagggcctgcttgccttctcagcccatgcccagagcccctgtgcccctagaggtgtcccagccacccccctcctctccctactttcctcacccttgcggctgccaggctaagcaagggctctatctagataaagccccacacagaggactcatttgtggagataacatgctctagttctctctcccaggagggaggaaaggaggagggatggaagtggggttcctctctctgccgtttcctttttctctgcttttgatggtgggttgtggggagaagaaagatcctcccctctcctaccccctctttgggatccactccagcccggacagtcaccatagcaacagtagacatgtgactgcacaggtctctcatagtcactatggcaaccagtgtcccccgttcccttggttaccatggggatctgtcacatggttttcccccaacctgataacctgtgggtctccctgattctcctcccctgcataaggacaagacaacagcctcagtcaggggagatcatgtgagaggggtctttttaattaccatgacaacaaatccacaccacctggtgacacatcctcctgtcgttatggcaacagaagaacatcacacagtgacatactgccatgttcccaaggaaacaagccctactctgagaagggtgaaagacccccccccccattaattattcctctattcagagtgtcccaaattgtcgtgtgccttggtctcttccctgtccgtttatgcttacgtgtcgtggaaggagagctgtacagggtgggcaggatgttacttggaagcaggctgaattgccaagggacccttaagaaggggctgacatgatcaagagctgtgcatgaggttattcgggggcaggctttgcctgtaagaggcctccagtctgagcctgggtaaggtggggacagaaagaggggcaactcctctgtgaggtcacttctgtaccttcccccagttataagcagttcacctctgtcaagggaaacaaggcaggaagacctgaatggggacacacatctggcttctaggcagggagacttattgattggttgattcgttcattcattcattcagtcttcccaggtattgatcatctgctccgtgccaggcactacagcaagctccgtaggggatctaaagacgtatcagaatgcccctgcctgtcaggagccccagctcagcaggggaggtcgacaagtgcacagattactaacacggtggaactctgccattagaggggtccaagcagatgtcctgggagcccctcttcctcagagatctactgcctccacacagagacattcactcactggggctccttccagacccccctttccctgcagaggagaggaggggacctgcatggggaaagcagaccagttcttgagggtaactgtgtctttccctttccaaatgatggctcccttcctgtccccctttttccagggtgacccctggctgaaccccattctggggagagatccactgcactccggctctactcagaaaaacaattccatggaaacagagcactttttatttcctccctgtcatctgcctacccccaaaaacctagaacttttttcttaaaccctcttattcttgtgagggggtgggggttagggaaactgcagtgcattaggactctcggggtaccacggacaggtggcgagcaggcatgtgagtctaggggagaagggcctgggtggtggagaagagacaggggagggctgtcaggggtttgagggattcatgggctatgggggagggcatgtggcttgggagtcagaacagagatgggctatggctgggaccagctgggaggaaggtccataggttcctgaacattcctgctggcctcttcatgcctggccaaagccttctcattccagaagcaagattccacctgctctgggccctacagagtctggcttggtgggtcatgccaggagctgccacaatacctcccccatccccattccccagggggtctctggtctcctttccccaatctcctgctctctgatcttttctagcctctttactcttccccacccttctcatattttccttaaagaaaataggatacttggtcatttaaccgtgagtccagtgcctggaaccttctaaggtccggaggccgttttgtacattctcctgctgatgggctggaaatgagtcactccatagaatccactgtatggaaagacccagggtttagaaagaacccctctctcctgcttgctgttttggctggtctgggctggaagccacaagcaggtgtgatggcggcaatggcctcttgggggagggggtagacattgtccactctgcacggcttgggagctatgcccagcatggtgcctgacacataatgggtcctcaatatttaaatgtgtgaatatgcctagtggtcatttgagggtgttgagaggttgggaggctggtggtggaagagggagccccgggctctggtgctgtagcaggggggactgcagctgtggacgtctgccttacacctagtgccagggcggtcatgacaggcagttctgcctgcctgagcagctatggtgtgcagaggaaactatcatatatcaggagcttggaaaccaccgtctcatcctgccttctcgggtgaccttcagcacatgacttcggcatttctgggcctcaacttcctcgagttctggggaagaaaatgatctaccccagatatttcacagggctgttgtgagcatcaactgtggcattgtgtgaaagtgcttggtaaactgtaaggcaggcataatccgactttaggtttgtataacacattcacatacagtatctcatttgcttctcacatctaccctgtgaggtagggagaataggattcagattctgcagcaaactcatggtgtctggcatttccacaggcatgatcgatttattccccaaatggcttgtgcaaatagtcagggtatttgtggcttgtcttcctttacagatgaggaagctgggtccagagaggtgagatgaccaaggtgggactccccttctctgatgaggagtctggggctgggggctggtctgcgtgtatgtcagggccctggcaccacacctgcttagcctcagatggagccaggaggtaaacgaggaggaggtgttagggcggggtcggggggccggcctcagctccagccttggccagctgtttccttgactgccagtacctggtttgagcgcatcagcatgttggtcatccttctcaactgcgtgaccctgggcatgttccggccatgcgaggacatcgcctgtgactcccagcgctgccggatcctgcaggtgagtgtgtgtgtgtgtgtgtgtgtgtgtgtgtgtgtgtgtggtgtgtgtgtgttgggggttggcccctcttaatcttaataccctctactcctctgcaagaggccctgacccaactggtggggactagggtgggactagagggtattccctcacccacgtctcagtttcagccacctcttgtccccacatcaggcctttgatgacttcatctttgccttctttgccgtggagatggtggtgaagatggtggccttgggcatctttgggaaaaagtgttacctgggagacacttggaaccggcttgactttttcatcgtcatcgcagggtgaggacctgggctggggtgggagagcaatggatcagatcggtcccttccccggggccagggttctgggcctgtgacctctcagctccagcccagttacagcaccactttctccctggctatctcctgagggtctgaggctgccctgcctctagcactgtagcctatattctaaattccaaggccctattcctaattctgcccccttctctgatgggcaatctgtccttgtctcggggtagccttgccccccagacagagagccggatcttcagggtcccttggtgaagaagaagaaggagtcagaggtcatcctgctgcccctaaagcaggattcctcattgacctcttttgaccccactgtggcctcagactcaaagggcctccctttgggcccctccctgcaggatgctggagtactcgctggacctgcagaacgtcagcttctcagctgtcaggacagtccgtgtgctgcgaccgctcagggccattaaccgggtgcccagtgagtgacccctcagccctcagcccctgaagagagccccaggaggaaatgtggaactctcagaccccacctctactactgtgtcctcacctgacccctcacaggccccgtcagagaagggctcagtggggagctgggattgctggaacaaaatggaactcctgaatgtggcactatgggagttacctgggaaaaccccacctcattttagcctggctttaggtcagagtctcagaaacatctcagatgaccctcttccttcagctagatgaccactccccccaggaggataggggtgtggggactggagaggctgacaggcaaggagtggacgcaaagtgctaatggccttttctagccagaacagcctctcatgcaatctggttcttgctggtgagacacgctggccacgctgaacgtgacttctctcaagacaaggccactccatgtctcaccctccgcctctgtccccttcctccttcccgcccccttccaacccattgcagtaactgccgggcccattatctaaattaaactgcattggtttctggagccagcgaggctttggcagctctagttctccctacatactgccccctccctttgctcaggccccctttgcaactccccaacctacacaagctgcagatggtccctgctgtggtcctaggagtggggtggttggcgaggaatgcatgtttctggggctcagtgcctgtttgtgtacctgatgtagcagcagccccctgcgctctgtgtgtgtgtgtgtgtgtgtgtgtgtgtgtgtgtgtgtgtgtgtgtgtgatgttgctgctgcccctgggagggcagagctgttgaatgtgtcctctggggctcggggtgtgttggtgttaacaggagctccagaagaggggcatgcctcgcctcctctcccgccccaggtgatggctggcagatttataggcctctgtctaaccaccggtgtaattcccttaatgcaaaccctgaggaattgatctcagttggagcacagagaagctgaagggggatggggtaggaggagggggagggagactgagtgagaaaactgggctggcaggggcgaggctgggcgctgcagtcaccaagagggttaattagctgctgcttagcagcttttgccctggaggggccagggggccatagatggcactttgggggtgaagccagccattagagatctgtctgcttgacgagggcttggcggactgggggctggttcagaccatttgggccggttgggttctagacctggagtacggagagagggaagtaaccctaacagggcttttgaggagggggtttcagtggctttccctatggagggggttgtaaattgatggacttctgagaagacagtattgtatctcttcaggtcctgatttggggatctggaccaagcagggaatagtttcagggaagcagggctcagagccatagtgaagcacagggcatcttggcccctgcctaggagctggctctcaaaatgagattcctgcctgctgtcattcctcctggagttcgctgcctcagtttccctaatgactctggtggtgataacttagaaaggtcaagtgactgtgcctgttgagagaaggaagtaggtagggagtgtgcgtgtgaatgtgtgcgggtgtgggtgtgtgttggagagggattcggaagccaaagcctgggttcgagttccggcacctacacttagcagctgtgtgatactgggtgagtcaagtcatttctccaagcctcagacttctcatctgtgaattgggagtgatattatccacatgtgatgatgttgggagagttaggaggggccacagtttccccagctcactgttggtggtactgtgcagattaccgtgggcaagccacaaggggaagtgggtcggggcaaggggctgcagaggctatctggggagtcagaggtgtctgttggtctcccctccagcttgagccgggccgtctcagcctcagagtccctggtggggcccctccgggagtgctgccgggccgtggcagtcagcctagcccggccagcctggtgtccccagcgtggcttctgcccccacaggcatgcgcatccttgtcacgttgctgctggatacgctgcccatgctgggcaacgtcctgctgctctgcttcttcgtcttcttcatcttcggcatcgtcggcgtccagctgtgggcagggctgcttcggaaccgatgcttcctacctgagaatttcagcctgtgagtggtggacagggtccagggaggacctgggagtggttatggggctgggcacccccccaagttcctcacttccggttgctactgacatatctgttctaacatctgagacatatctggttctcaaacttggctacccattggaaccacctggggagttttaaaaagtactgatgcctgggtgccacctccagagattctgatttcattgctctggggctcagcttggatgtaaggattttttcaacccctccagtgatcctaacttgcagtgaaatttgaaaatcactattccaggatgtgaccttccaacatcctgagtctggagtttccccactcaggcctcatgctcctggtgctcacaaatccctgccctgcccagtcccttccccattcttggttctgccctgctcaccctatatgcctcgagcactcgtgccatctctcccttcctgggccctctccctggagagcccactccccagtctcacccctgttccccttcccatcctgcagccccctgagcgtggacctggagcgctattaccagacagagaacgaggatgagagccccttcatctgctcccagccacgcgagaacggcatgcggtcctgcagaagcgtgcccacgctgcgcggggacgggggcggtggcccaccttgcggtctggactatgaggcctacaacagctccagcaacaccacctgtgtcaactggaaccagtactacaccaactgctcagcgggggagcacaaccccttcaagggcgccatcaactttgacaacattggctatgcctggatcgccatcttccaggtggggcagcctgggccccgggagcttccccagaacaccagccccaggacacagcccaggatcggagtggtcgctctcagggttggggtgggggtcaaggcctctggaggagactgaaggaggatttggtgggcccatagtcagcctgcccctctgcaccccctaggtcatcacgctggagggctgggtcgacatcatgtactttgtgatggatgctcattccttctacaatttcatctacttcatcctcctcatcatcgtgagtgactcctcagatccccgtggggatgggcgatcctggggacacctgtgggggcagtccagagaggggatagtttgctctgtctgaagtttttagctctcaggacaagtcctgtagagagggcatccatcatatagtaggagggacaccagatgcagagtcaggaggaaatccaaggtcaaggcgggacttaactgctattgggaccttgggcaagtcattctccatgaggcctccagcactgctctgggcctctgtttcttcatgggtaaaatgaatggttctcaacctgagatgataccacctctcccagagggcatttggaaatgggaaagggtgattctggttttgattttttttaatagctttattgagacataactcacatatcattcaattcatccctttgaatgaatccagtggttttttaagcatgtttacagagttctgtttttttgtaaggacaaggggagtgcaattggcaatttgttactgggggaggggagagaagctaaacatcctgaaatgcttgcaaataaagaattattctacccaaaattctgatcagtgatcaattggtgttaaatgctgcctgatctcttattcctgccagttcagaaattgccagactttaagaaggcagaagacggaggcaaaagcagcaatatttaatagttttaatcactaccattcatagttaataacttcatcgccaccactttgagctaatatttattgagcacttactatgcgccagcccctgatctaagcactttcaatgtgctggtgcatttaatcctcaccgtgatcctctccattttacagatgaggaaactgacatttcctcatttatctgaccctaccagacgctttgcctatgctgtgtattaatctccaagagtggggcatcactgctgacgtatgctgtaacatctgctgcctgtttaatcctcgtcgtcccctgtgaggtgccagggcagggattgtggtccccatctcttaaatgagaattcagcgccccagagggtgggtcactgggccaagatcacacagaaagtaagcggctggggctgagaattcagtcccaggctaacgactccacattcagcctttcttccatgtcaccaagaggccaacgacagagccagacagagggacagacattgagagaaagagattaagaaagattaagatctactcaggacctaggactagctccagagagagatgaagacaaaataaggcagctccttgtgagagacagagggtaggccctgagaaagagcaagtccccaaggccacctcattctgcctgcgtaacttcccctggtgcggaagagtgggcaggcttggggcgaagcctgactggaggcctgttcccatccctggccaccacctcaaggggtgaggccagtgcttcagggaagtggggtcttctcaccatgtgccccccccacccccactccctttccctcctgggcttgggagagggggaaggaagcagacagggagataaggggcctagtttccaccctcccacacaccccctgaaaaatctttcctaacagctctctggaatcacactagtgaagctaattatcataattactaggacacgatctagaaaaaaaaaatctgctttgtcaccataaatattcatttccttcatttgggattgttgtccaagcaatggctgttccagagttctggggaaactgaggcgtggagatggggactggggtagtgtgagcaagtcaggtggcagcctgactagtctgtagggtcaagggttcagcccctcccacatctgagggaggggggcacagggaaaatggggacagacaaggccaatggtccctgttttcagatgaggatatgaggtcccatggctaagggtctctcgcccaaagtcacacagctagaattggggctagaagcaggagtcttgtaaatgatgtttttgtcaagatctcaaggctcaatataatttgaaaaccccatgtccctaatattgcgttcatttccacagcattcgctactcctaatggaaattgcggaagggatgctgcgtctctgcaggtgtgcgtgtttagggacagggaatttgagagattgcaggataacaccatgttcaatagcaatatcttggaatttcatagagcttggttccagtcttagccttgctctgaattagctgagtgatcttgggcaaatgtttgacctctgtggacctgagtttccttacctgtctgatggagattacaatagcatcacctcctgaggctgtcttaaaaataaaatgagataatgcttggaaaataactgagcatggcgcttggctcataggaatgcctccgtatgtggtggctggcattgtgattcacttttcttcaggacgtttcctcttcctgtccccacccctacaggtgggctccttcttcatgatcaacctgtgcctggtggtgattgccacgcagttctcagagaccaagcagcgggaaagccagctgatgcgggagcagcgtgtgcggttcctgtccaacgccagcaccctggctagcttctctgagcccggcagctgctatgaggagctgctcaagtacctggtgtacatccttcgtaaggcagcccgcaggctggctcaggtctctcgggcagcaggtgtgcgggttgggctgctcagcagcccagcacccctcgggggccaggagacccagcccagcagcagctgctctcgctcccaccgccgcctatccgtccaccacctggtgcaccaccaccaccaccatcaccaccactaccacctgggcaatgggacgctcagggccccccgggccagcccggagatccaggacagggatgccaatgggtcccgccggctcatgctgccaccaccctcgacgcctgccctctccggggccccccctggtggcgcagagtctgtgcacagcttctaccatgccgactgccacttagagccagtccgctgccaggcgccccctcccaggtccccatctgaggcatccggcaggactgtgggcagcgggaaggtgtatcccaccgtgcacaccagccctccaccggagacgctgaaggagaaggcactagtagaggtggctgccagctctgggcccccaaccctcaccagcctcaacatcccacccgggccctacagctccatgcacaagctgctggagacacagagtacaggtgagaactctgggtggaggcatgtgggtgccctcgtctggggactgggtggcgtcccagaggggactagggggtctggagtcagagggaccagggcttatattctcatgctgcctctcatggcttaggcaccttcaaccagtcacatccctgctatgagctcgaattttctcatctgctaaagtggaactcataattcctacattgtaatagcagtaactatcatgtaataagcacctgcttcgtgctgtttgcaatgatgtctagcaactgttgcacacagcaatggctgtgtgcctgtcacatgctttgcgggcaaaattccattggatcctctctacccattaagtgataggctttcttagcatccccattgtgtggatgagaaccaggaggcttgaggggattgcatgacttgcccaaggctttgctattggtgaggggcggactcggggcccgcactcgggactccttgttgtgaggctcagagaggaaatggtgtgtgactgtgcccagcttcatgccccactggctaaacctgagtctcattgcctccgcacagggagacccagttcagggagctgcttgtctgatgggtgacactcccagtgtcgtgggggcagtgagacacatagggacgtcgggctctccccagcagacaggttcactgtagctgcagcccacggcctgtgtttcaggaaggatgtggcacgtggggagcagcgggatattcgtggggatgttacgtgggaatgtgggctgggaccagaaggtgctatcacagaacccagagcgaaaggtttctatgccagctcctccactaccctgccacgggacgtgggccagtcacatgcacccacgtttttatttcctcctgtgtaaaaggcaaggctgggcccataattactctcagtgggtgcttactgactccctcctgtgtgcagatgcagtcaagggagaaatgtcgctgagagcccacctggggccaggccctgagcggggggcttccacatccatgctttacctggtactctctgaggttctcatattctgtgatcaaagctggatttaaagggacattgatgtcttgggctaggtccctgagtgtgtgcgcacgagtgcatctagtatgcgtgtatgcgtctatgtccatgaaggggtccagtgtgtgtgtgtgcgtgtgtgcatgcacgtgtctggtgttcatatgcatatgtgtgcacatgtgcttgatgtgtgtaggtgcatgtgcgaagtgaagctctttccttggtgtgtgtgcatgtgtgcatatgtctggcatatgtgccgtgtgtgaatgtgtttgtgcacacatgtgttggtatgtgcatgtatgtgtgcccatatggtggtgtccaaatagtatacatgtgtacacgagtgtgcgcatctggagcacgtgtgcaggtgcacgtgtctggtgtgggtgtgtgtgcaagtgcacgtgtgtgggcgtgtcttaaggatcccatggaaagtgctgctcagaacagtgttgatgtagtcctggcttctgggaaggggaaggggagcgaggctccttgctgaaggcacctaggatataggagctgtccaggacctcagaggacatccaggccacctctctgagccccaggacactcagcagtgactgtcaatgaagtgctattgacattagggcatcttgtgggtcaagactgcccaccttgcctgacattcagcacccctggcccactaagtgcctagcaccccatcactgtaacaaccccagactccctgactcattttacacatactcacagggcggggtagccccaggtacgagactctggagcctctcacctctactctcctgttccaggtgcctgccaaagctcttgcaagatctccagcccttgcttgaaagcagacagtggagcctgtggtccagacagctgcccctactgtgcccgggccggggcaggggaggtggagctcgccgaccgtgaaatgcctgactcagacagcgaggcagtttatgagttcacacaggatgcccagcacagcgacctccgggacccccacagccggcggcaacggagcctgggcccagatgcagagcccagctctgtgctggccttctggaggctaatctgtgacaccttccgaaagattgtggacagcaagtactttggccggggaatcatgatcgccatcctggtcaacacactcagcatgggcatcgaataccacgagcaggtaggagagtgggcagaggcagggctcctgccagctgcttttcgcctggggctggggccttctacctccctccgcacccctcctcctgagctcagcttcctctccatgctgctagcccacctggcaggtaggaggggaggtgggtgatggagcaatgcatggagattctctagagggagtgcttaaagtctctgagtatggaggtcgcctcaggtaggccacagggtatgttctacccaggaaggctgctcagaggaggctggctttgaaggatgtgaacaagtggtgagcatcagcatgtggggagaggcgcgtcactgggagatgtttgggtctttggagaaggtgtagtgcggagggcgggtgttggaggtcctgtggcatccatctgacccactaagtccgggtgtgactgattggaggcaggaggggccatgtaaacaggggtgcagaggggagggttggtgcctgcgcctgggtggaatgaaggcctgttggggtcagggagggaggcaatctttcctggcctcccgtctgggagccgtgctgtgaaccagggcagctcagggtggatgagagtgcccagcatggcaaggggacttgaagccatcgcgtttgaggaatgattctaagaaccgggatgtttagttaggaggagcaagggctcagcagggacaggcaagctgtcttcaaatatttgaagggctgtcatgtggaagaggaagcaggcttgttttgtggggctgatggctacaagcaataggatctgggctgagggggaggaggcttttctaaccctcagagctatgcagagatagaaagggtagcctgggggaccccactgatcccccatcatgagctgaagatgcccgcttgttgggggtccaagcaggcaccatgggtcctcacaactgggtttggctccctcttccacagggttctttccagaagtcgctccccctccccccagtctggcctttcaggtcacccctgtggctgattcttggaaaaggagagaggctagcaagcaggtgctgcagttcacggtcctcccaggctctgttctcctgggtgttctggcctccctggggtagcacggaggcactgggccatcagaacccaaccttccctggtttggaacgaaggccatgcacctccccacctccgcaccctcccaatcaggagcagaggcggagggggccagtggtgtggagtggctcttacaccagcacagcaccctgtgaaaggggcatctcaaaaaggtggtacaggcagggtggtacaggcatgctgggaggtctgggttgaggctgaggggcacaggtcaagccgggtctggagcagacagtgaggtgttcacttttccgggggattcgaagcccgcccccacaccactgacctctgcacctgcaatatttcgagcacccagcttttacccaagactgctcgacctggccaggtgcacccctccccatcaccatcacacattggcgtcccttcctctaacctccacagggccccctccaagcagccatgaggtggagagagagtgggaccctggctgcagtgccagcgggtgggcgcacttgacaccacggtgggcatgttgtgtctgggctacgtgggtgtgggtgtgtgtgcacatgccaactctgccagcctcccagggagaggtgctccactctgccagattggtggcagtggggggtgggcagcattttctgcttccgggacccaggtggtgacagcccctaacctcccattactcaggctccctgaacctcagcctcctttccctcacccctgttccggccatggtcaggtgcccctcccccagggggcacctccccagtgccccctccctaccccggggggagcacccagcagtccctgcccagccgatgctgctggtggaggttttgattgcactgggaagaagctgagtcacacagacccagggcagatgaagccttggtaagagggctttcagttagatgtcaagaaggacgcccctttggagagaaggcagcagccgtcagtcaggggtgcctgcaccttcttcttgctcaggctcctgaggaagggcggagacagcccagggctcccactaagtcctcagcagcagggaggcctcactcagtgacagcagtgtctgctccagggagggttttgtccgcatacctggtgctgagggccccatgggggtgagcgggagtccccagcaggctgggcagatgactgacagctgtccagcgggctcaggggtgcggagagtaagaagtcccagaagctgccatggccctgtgcttgcaggcactgcggcgtgaacgtcccgccatctgggccctggagcctgggcaggctgggagtggggggttgccagggaaggcagcaaggagatgtggggggctgagacagagacacagagtgggcacagagagggagacagagacacatgggggaatggggacacagaaggagacagagaggagactgatgggggcgagacagaggcacggagggcaagatggagacgggggaggagggcaggaagagagacgcgcaggcaggggagaaaggatatggagggagagatgagccacagcggagacagacagagacaaatggagccacagagacacacagggagacagagacacagagagggagctgaagacagagaccgagtcccagatgcaaatgagggcagagacggggtgggatggggagacagagactcccctggagctggctgcatgaggaggctcacggcttccctgcggtgcccttaatgaggcaattgtgtccattgatcccggaatcgattggatgggggggcgggcactggaaagggtgttgctggtgctttgccagaggaggagtccctgccctccctcctggccgtcaccgctgccctccccaggccctgtcctctcccaccatcccctggctgactcatcattcgcttgtcccgtccccccaacctgcgctaccccaccatcctcctgactgaggaagcacctatatgtgataccccaccccgcccggggctggccccatgctgtcctctgtctcctgcttcctccaccccttaaccaccagctggaggagaactggcaggattgggtttgcccagagggctggtgagaaggacaagaacccaggagactgaggagagagcaagaaaatgacctgatgtcgaagtgtgatctgatatggggccagcctacatgtgtgccccatccgctcagggcggtacatggagtccagaacctttttccaattcatccttttgcactggagttgggcctaagcagtgatttgctggtaaatgattaacaactagcccttctaaaataataaagtcctgatctgtagcatttgccaatttccatggtgtaaatgctcccaccatagctggttttaagctaccaacacgattccaccgaatgtggggttgggaagagacgtggacaattggttctcccaagccagtgagaaacagctccagcacgccactgggcccaaggcactgtccttctttttaaagaggtcacaacaagtaaacggtcatatttacttgatgtggcacatgctcagagagggatacgtggaggaggagcccttaacccagaccagagaaggaattcagggagggctccgtgtaggaggtgacctctgggctgagtctgaaggaagagtaggacatagccagtgaaggtgaagggcagggcacagtatgagggctccggcagtggtccaggcagttcatactacatcttcatccctggaaatggagagcagagggctggggagagctggctggtagctggatctgcaggacccaatcagttggaaacatgggttgagaggaggcagcaaggatgactcccaggtttctacctggggtgggagcagtgtggcttgagcagatgtgggctgggagacatgttgcatacaaggtgcctgcgggccatcctgaccatatccagcaggctgtcggagctcagaaaagaagttgccttctcttctgtgtcctgcctggctctgcactggggccagacctctccaggaagaggggagtgcagtagtggggccttggagacacaggagcttcctaacatctccttcctggctctgggtcatggtggggtgggggacaggtgctagtctaatgttctagaagagggacaacagcatatggggagaggggagctacatgtagcccagtggtctcctgggctgtagacggggagaggagggggagggaccagggtagatggccttgcaggctgagagaggacagggcaggtgatgactctgctcattgctcacactctggggccatcctgtcactccagatacatgtccagagagggtttctatttataagtgagtgagtttggctgttcaaggcgagagaagctgggggtggggcaggaggaggtggtccagatatggtaagtctgaactttgaaggaggtcatagactccttttcagttctgctgaaggctggggaccctctccccagaaaatccccatatgcctggacaccctaaatgtggcctttgagggcaaaggttgatggacacctcccaccccagccagtcccttggtctccagatagaggagccctggctgaagagctagggctgaggaccaagcagagctttgggggatgatcctttgcagctgactggccccagacattcaaaggctatctggtgtgggagggagaggggcattgttttggagatgtctgctaaggtgttctcttgttcttttagtcatcccctggctccaggctctcccagttctgcaaacaaggggagcatatcctgtgcacagcacactagaatagaatattagaatatcagggggttgggggctgagccagaaacacccaagaaatgtaggttctggtggaaaagtcattctgtttcatggatgattatgccaaatgccgcaagagaggcttcaggggacaaaggagagctgctcatccccagctctccttcggaagggcttcacgaaggtggtggcttttgaacggagcctcgaaagatgaatggaattgacagtggcttgggtggtgggggtggggggaggtgggagatggaggggtgggtaggagcagagagatctaggtggagggattaaggcacatgcacagggtggcactcgatgctctgaaggacagtcaggttttcctccctgccctggccccgaggtgtctgagcagtgattgatgttagcccagcgaggaagccggtgcttcccattggtgcaggctgggtggaggagggcctagaggctatttctgttgttcagatcagaggcaaagagggccccaagtaaggccatagctatgggaacgaggggttgtgggtaggacgcaatttcactggcaggttctctgggccggggcaccttagtgtccagagggaggaagggtgggcaagaatcctagataacccgaagtttctaaggcagaatcccgagcatgatggcgccacccgggaaggagcaggtttgggagaggaggcgagagggtttgttttggatgcactgagtttgagatggctgtgggccatcccaggagggagatcaggcaggctctggatctctggatgagaagccaggggcttggagagattgtttagtgtcgtctacaccccagtgacagccagagaggtaggagtgggggtactggtggagggagcgggcttagactgaactctgaggaatgctggcctgagggaagagaggcggtgaaatgagcactgggaaggggaagaggtggttgctcagggtcggggaagccaagggaggctcagctgctgctgaggcatccactaagaggagggctgggaagagggtccctggacagagctggagctgtggggcccagagttcagaactgaatgagtctggagtcccacagaagctttctgcttttaggcacgggggaaggagattggagaagtaatggatgcaggcataactgataggccagggcccaggggagccgggggcgggggtagggggtgacaggggggcggcgggggagcacatcaaagaatcaaagtgcaggtggaggaacggctggctcccttccaggagaggaagagagacagtgggatgcacaacacagagctctttggaggagggacgtggagccccccatgtaagcctgcaacgaggggccaggtggggagtagggctgggggctgcagagtccagaaggattgaggcagctcctgggggagagaggagacctaagaagggaggaaccagggactgtgaataaaggcatgaaacagccatggggccaccacccacagggaatcacttgtccagtcagcacatgttcgtgcctctctctagcgatactcagcacttccagagccgcagaggagaggaggagggcaagggcacttacctgggctggggctgggcagggcaggagctcttgaaagtcttcgtcagaagggcagcctttatgtggcctactgtggcccaccatgggctagacgctgtgcaggtggacaaggcacaggggctgcagctccagcattttattatttatttattttaagagatggaatcctgatctgccccctgggctggaatacagtggcttgatcatggctcactacagcctggaacttctgggctcaagcgatcctcccaccccagcctccccagtagctgggactacgggcacctgccaccatgcctggctatagctccagaattttaagtagcaggggccttgggtcagctgtcttgaagctgagtgggcaccgtgagtgtgctgtgcctagttagcttgtgtgtttacttttgagggcttcggggagctgggaaatatcatgtcacctacaccccaatgacagtggagaggtgggagtgggggtgctggtggggggaataagcgtagaatgaactctgaggaatgttgccctgagggcagagaggcagtgactgtggctaaagcctctccttggcactgcctctgattaggaggccctgggggcaccatgacacctagcagtgtgcccagtgggcaggagggcacaggaggggggatccaaactggagagcttccgggggctggggaagaccaggaccatgatctacatgatgaggcctgtgagatttccaggaaacctcctgccaccgaggtgttccctgacttcccacacctccttgaagacttgcctcccactgacccagtgaccctcactgcctcactgcagcctgtctgtgcccctgtcctgggtgggtgggagcagcaggcaggcccatcagaagcagaggtgaggtgagctgaggagtctgaacagaagagcagagatttcagggtcagtggagcaggtggaagctggggcgatggcagctggctggggtcgggcttgggcagagcacgagtgactggtccaagcctctgctcagctctgacgaggcctgtccagcccctcatgccctctctgcaagaggcacatcactgtctgccagagctggctctcaggcctcctgcctggactgctgcagtatcctaattggtttctgtctctaccctccaagccgtccacacgctgccaccactgcagccagattaatcttcttcatacactgctttgtacatctccttcctcccttcccacccgcccccagggcctcagtggcagcgtggtaggcagagacttgtccagagggagcagaggaaggctgttccacctggccctgccgaccttgtagccttctctcccaccagcccctctcaccctctgatctgggcagacaacttgattcttggttctgcactgtgccctgcacaccccttcccttgctgtccccagctggggacaccctccatggacatcctcccaggctgtcctccccactggcccactgacctcagccgggattgagctcccgtggctcctgggttttgcccccagtgtggtgtttagttgcagccttgcagatatcggtcctgccttctgtgagcttggccctggggctggggtttctcacagcctttcactcctttgttctgtagagcagcctcccaggaggtagtgttaccctgtttaacagaagaggccactggggatctgagaggcaaagggaattgcccaaggtcacataggaagaaagtctcagagttggtggcacctttctaacaccagtgtttggcacacagaaggcacttttagggctagttgatggagcagctatgaggcttggggagccccggtgctgggaagtactgagcagcttaacgctgctgcaaggtgacagccggaggggaggggagtggaggtgttaggaaatgggagatggagatttacagtcaacatcagcacagacaagagacctgggacctctgggtgggataagctcaggctgcctggcctcatttcaccgaaacctccactgggccttgacatctgtgaacagcaggaaggatgcaggctagacctgggaagggacttccacagctgggggtggccagtgaggggtggctggctccagcctgatgagtttgtgtgctctctgtgtgagctctgtctgggtatatggtgggggcgatgttgtggaaaaggtcttgagggcagagatgtagagggaggcacaacggacctggctctgcacctctccaggagggtgatgtgacctccatcaaggcaccacacccctcggagcctcagtttcccagactatctaggaggctcacagccctccctcgtttgttgtgagcagggaggaaatgaaatcccacgaggaggtcttcagcctagttggcctgtggtgggcactgccagatgttggctccacccctgccccttttcagccgtaattacagctctggtccctggggcaactttgttgctaagattgtgtctctatgtcctcgtcctgcattcgcagatcgttcccagcctccaatttagtaacttggacagacctggctatctgggggaggagggctctttttccatggctcactggagggaataccggggccctggagaagaagtggcatttaccctaagtgttgcagggagactagagagagcaaggcagggccgagggagtgcgccaggcccctttccacctgcatcaggctgccctgcttttccaggcctggagtcacttggctgggcaaaacaggggttccagcctttgctggcacagcccttgacaaagttcaatgaggcaagccttatgggacggcaggcttctcaggagcctggcatcatccttctccataagcctctcggtggtgtgcaggagagtgaggtgtgcacgtgtccacaagccatcagtacagactcctgagagccccgtggataacatcggggagtgaagagaacagtctccttctccacgcacagtagtagtcggacttttagaattcactgattgagtaaatacatgacatcaaaagctactgtgttttcagcaacttttaaaagaacgtttcattaatttttatttttagcagctttttgggggtatagtttatatgccatgaaatttgcccattataagcgtacctcagctgtgtcttcacatcgagttggtctttattcctagaactctgttgatttgaatataattttagaagacacgttgtgtatccagtccaccgtgtatctggattcacaagcccctcaccatcaccgtggcttggttctgaatcctgactgtctaatattcttggagtcagagggatgtgggattgggccccaccccagctcttcctgccctgtgactttgaacatcatacctgtgcggtccatgttcattttaatctaatccaaggcccgaaaacacggcgagtggcagagtgacagggaggagggtttgccgactcccgctccctggcagaccggacttggaagtacagagtggggggatccacttagccaggtggggtctgagcccagggctttatatgcattgatcctggccccgccccacctcctgtactgtgctcacgccggagacactaatggccctgtgtgaccgggctaaccaggtcaggtggcagtgcccccactcacaatccacggagctacgacttacttgagatctgctggagcaacgggctccatgccatactggcccccacgacagccactccccctctgcatagctggctgtctgcctgcctgctggccctgactctgcccccaggcctgcctttgaacagtctgaaagtttatctctctctgagtaactgttgtccccgaggctcccaaatgccgctcacctgctagtcagaagccccttgttccgagtcttttcacctcccatccaagctggctgcacaaactagggccattaggatacatttgggtgtcctcaggcctggctgcaggcttggttgggcagctggccagcgagacagtgagaagcaaggagaggtgtctgatggaatgagtgcctcatttgaatgtttcattaacccatactttttgagcagctactatggacttggcctctgccctccaggccagacacctagtttgtccagacatccatcaggtggacagtggggtccattgagccaaccatatctcttcttgcttccccagccctctgcctggccacacccctcccttcttcaaccagaaccaggctgaggttgctcatgatccccccaccccgtgccacaccacctagacccttggctggggagactccacaaacccttaggcattcaagtgctgcctctctcccaactaagcctttctctgtgtgttcacccctcaccttttctcccctgaactcccggacttgctgcctggataatttattttggcactgaagcatttaaggcctcttgtggttattcagccgttttgtgtgtgtacaacgtgtttctagcagacactgagctcctgggaggcggggcgtgtggctggcatgtttttgcagctcctttaatgcctggtgcattgctaggcacttcatattgaaagcgaggtcactagtgagctggaatggcagatgagacagggttcgtcattcgtccttctgaggactctagggtgcatcctcagtcccagtcccagactcgggtagggagcatgaaaggaattacctctggtgtttcacatttggccagagaggttgagaatcttgctgaaggtcacagagtgagtgacaggataggctgaggattaacccgggtgtcccgggctcaggctgaggctccaggtgtctcctcaactgtgacaacccttcctgggtgtctgcgtgtcttccttctgcctatcaccatgtgtgtgactgggaatgcgtgcatttttctctctctctctctctctgtgtgtgtgtgtgtgtgtgtgtgtgtgtgtgtgtgtctggaaggaagcaagagtagccaactgttgtccaagagaaagctgccaagtccacagagtaattgtggaatacatgtgacgttgtgtggggcttgacgaccgggtgtgcctgtgaggccttggcgatcgccctctgacatccgccagcattgtcatgctgctggcctgggcccgctaggcttgcattgtagcctaggtcaagatgggccatgcagctcccagcaggagatagggcggaacccacaccacaggcctcccattgagtttgtggcccctgaatctgagacccagagctggggctatgggtttcacgtggccctttcctggggcccctgcccctgggtgcatttcctcctggagcctttggggcagggtcctccccatgggcctgagcatccagcaacccctccgcacaagcttgctattcctgctcctcctctccctggtgtcccatgtttggaggactggatcgaggggctcagtgataagccagctgcctcacatcccaccctgccctgcagcccgaggagcttaccaacgccctagaaatcagcaacatcgtcttcaccagcctctttgccctggagatgctgctgaagctgcttgtgtatggtccctttggctacatcaagaatccctacaacatcttcgatggtgtcattgtggtcatcaggtatgactaccccccggcactgactctcagttgaggaatggtagcaggggtggcttggggccaggggccatgccacctattcccctggggtggaggggtctggagtcaggccccactgaccccacaggacctgccactcctcctaggtggggggctctctgtgtccccatgccccctccatctctctcttggccccaccttgctcctgttgaccttgggctcacctcttcattgcccaggcccctctttagtctcctctctccacttctacctcttgtccttgaccccacccaggcctgggatgggcgagggtgagattggctttagaggagttggaagaggtatgaggcccagccagctgcccggctcgaaaagtgcttggaaatcatctcagacaccagcaacttgctttagggtttccaagaccttgggaaagtgctccgtccccgcaaggcctggggccaggagaaccactttattgcttttggaattggctttagatttcattagaagagaacaaagcaaatattccataacttgatgcagttgcattggccagatttagggagggagttgtctactgccaggatgtgatctctggcagggaggagagggcggagggggccggggctgtcacccaaatcctcactatcttggaggctcctgcttagaggtctgggggcccacctgtgccccattttctctcgacgtgcccacccagccaggcccttgggtgctactgagtcctctccgagggagtagggggagagggtgaaggtgcagggggctcaggctgcctgccccctttgcagcgtgtgggagatcgtgggccagcaggggggcggcctgtcggtgctgcggaccttccgcctgatgcgtgtgctgaagctggtgcgcttcctgccggcgctgcagcggcagctggtggtgctcatgaagaccatggacaacgtggccaccttctgcatgctgcttatgctcttcatcttcatcttcaggtgagggcggcatggcaccttgccggctgagagaccggccaggctgggggcaggagggcctgaggggtgaggagcactgggctctgatccctagcttgtggcccccttgtgcccacagcatcctgggcatgcatctcttcggctgcaagtttgcctctgagcgggatggggacaccctgccagaccggaagaattttgactccttgctctgggccatcgtcactgtctttcaggtgcgagggtaacagggcagggcgtggacaggggccgtcaggtgcccctagtataggccctgattcctgtcttctgcccgcagatcctgacccaggaggactggaacaaagtcctctacaatggtatggcctccacgtcgtcctgggcggccctttatttcattgccctcatgaccttcggcaactacgtgctcttcaatttgctggtcgccattctggtggagggcttccaggcggaggtaacccactgctctgcccacctcaccctgcccacagcagtcccacttccaattggctgcctgtcttgagcctcctccctctgttgccaactttgggggcctgggaagtcccacaggaagagcctcttagactaagccggggtggaccagggcgggaggctccagatctcgtgcagcccctcatcacatgggacacagggtggttgtttggggtccctccaccaaagcttagctaccgagtagacatccccttcagagttggctagaccccttccccagagaggcagaccagataagtgtctgcctgtggtgcagctggactcctgagcacagtgctctatggaacacccggagaggacccctctgagccgaggggtgcaggaggcttgtgtgcaagttatctgagctctgactgagcagatgaagatgccactaagaccagagcagggctgagctgcccagggtgagaaatgagcccaattagctacgggcatggcagagatgagcgtcctatttccagcccaggctccatcaccttcgtcacaggcagcgtcatcaattaatattgatttacattgatcctgcccttgccatgtcagcgagcagcctctgcccagagggctgcaccccctcctctccctcagctctgcctctcttcccacccgagcccccagacccaccccagcttgctggggcttcaaacagggcagtttgacccaacctagaaacgctccaggttgggtctggagaagctcttggtccagttctctctgggtgacccggatggaaactcccgctgcggcctggtctataaatacctggcacacggtggaaaaacaaaaatctattttccgactctttcccagtctttcaagggagggcttttccctgtgggccggctgggttggtggggtgcagcgtatctgtcccacactggtctttctccccgctacccttttcagtctgtagttatccgttatcgcatttcctccctcctgtggggcagccagggcagctggtgggggaggctttggtgatggctgtgcctcttgcagggaaggagggagggacgccggtatgctccctggaatgggacactaatttgggggttccctgaggcctgaagaattaaggggcaccacagtactcccacaagagccagtagactcactctgctgctgctcagggtctataagaggaggagctgagtgaggaccgggccccctggccccttctgaaggcagctcctgccagccacggttccctcagaaaaattcccgtgcaactctgtggagggaaatggaaaacaccgcgggcctattcccctcccctcctctgccactcagccgccaaggcagtctggaggtgcccagcacagatggccccctccccagcactcagccctttcagcaaacaccttgttaacttgagtgcagctgagcggcctggttgctaggcaacagcaaagccagagtgtgggaatgagcgcagcctggccctggggcggcctggtcactctggccctgctgggggcctgggactgccccagtgtgagggctcaacaaggcccacgcagccacaccctccccaaccttcgcagtatcaggacctttgcagggagggtctcactcaggatgcggtgtcttgggctgggatgcttcaggcctggggtgggatggagaaaggactttaagaacatcccctctccatgggagtgggcagtgactgtggccccggagtgcccatgggaggggctgggccagttgctcccctgtcctgcatgtggtgggcagggctggggagtgtccttcgatgcccatggcctggacaactccaaggcacctgccctctcctgggtaaggtttcagggggccccacggtctggcaggggagtctggttttgctgttgtggtggcctgggatttttgtttttattttgacaaataagacaacccaccttggcagaggaagtggctgcccccattttggtgggcttccccagcaggaggcttcaagggtagcccccctgctggccttgctaccttgccaagagctaggagggggtggtccagggacacagcctgcttggctggtgatttcctgacttgcagggggcagcgccctgaatccctgtgtatttatcattcacacacttaattaaatgaacaggcagcaggccctgtgtgaggccattaattgatactaaataacatcagagccatcatctcagcattacttgtcacatcccatctcaaacggagcagctggatctgttctgatctgaagggacttaagctgagagcatgagacgttatgaggcctgacttggctccgtgttgactctgactttcgtccattcctttccttgcttcctacccattccccaagcccactgcctccgaaccggtgagaggagagtggtgttctgagccacagactcgggttccaggcccagatccacctcttactctgtatgatttggggcagtttccgcaacttctccaaatctcgggtttctcttgtgtaagatggcgatcctggaacccacttcctaccttgcaaggaagccagctggtgttaaggaggcagtttcccatgccaggcacacccttaatgaatggtggctgttattattaggattatggggggacctgcccttgtccccatctttttggcctctgcactcacccttcagattcattctggcctgagggcctgtagttgaattctggaaggctgttctgtcccctctctgcccccccattccccgtgtctctcagttcccctgctgtggggtttgcgcccctccttttcttcatcctctctcgacactgccgatatctgaaggccccgagcgcctgtgaccagcagccctcccctgcctccccctttccctgtaggaaatcagcaaacgggaagatgcgagtggacagttaagctgtattcagctgcctgtcgactcccagggggtaggtacgcgatcatgagccggcatgcctcccgtgccccatgcccgtgcccctccactccgcctccgtgtctctgtgctcgtgttcacgctccgctgctgtgcaacctgtcatagccgtgatggtcattggtgttgtgaggtttgcttcgattttaagtcccttcccccttgaggacacggaagggaggcacctccttgcctctgcccccatcaacccaccaagggcaccatctccatccctgccagactggtggatgggccggagaaggaagggacttagaatcctctgtgtgcacgtgtgtggggcaccccgtgtgtgcgtgcctgtgctgaggtcccggaggagtcccagacgtccggcttcagtggagtcaagatctggccgtagaccatactcccccatctcccaccccttcaccccttgccccaggcccctgttggagaccccgcaagctgtctcagctcaggacaagtccttggaggatgtggggatgggatgtggctcttgccaaaatgtaccaatattttaaatcacctctgagcctttggccccttcatcacccacttgggtccggctggcgctgtcagggctggctcccggtctggccccacgatgagcctgtgctctgctgttccctgccccagcaccagaattcggggcgaagccagcattcctgtgggaccccatggtgctgcatatcccgagcagccccctggagatcccacttgataattaaaggcctcgttagggctgtaaactgagttaatgaaaatgatcccctgagatgccaattacccaatatttatgtccttatcaaaagtagcaatcaagtattttttaataacttcttaaggagaagtgtgtaattactggggaacctactgacctgctaagaagaaagaaaaaactgtcccagagacagggagagaggtaaaaatggggccagggagggggccgggacttggggaagatgaagggaagacaccgagggactgaagtggcgtcctcgggctgagctgttctgtctggggtctttcaatttccttccagggtcctcgagtctgaggctcaggggaggggagccgtggagagaaagcaaagggcctccagtgaacttttgcaagagaggctctagtgaccacttcactcaggtccccaggtccccagccccctctggcctgtgccacctgccacctagctaccccttctctccccagccagccttggtgaccgttcagccaggctggttgtgctgtgggctcacataagctgtggccttttctgaggtgtggctggagaggcagaggtggtggggccctgggaagcctcgggccccaagcctggggggtctggcctgcgccgtgcatgtctcgtgccgtggttgctggttcctgtggcctatatgtggtgtgcgtgtgtgaagagagggaggcccggtccatcccaaccacccaagcctggccggatccctaatggtccgctgctcccctgccctagggagatgccaacaagtccgaatcagagcccgatttcttctcacccagcctggatggtgatggggacaggaagaagtgcttggcctgtgagtacctatcctggggtgcgacttttggccctgggccagccctgtgtggactcgggatctctccctctctccccgtgcagtggtgtccctgggagagcacccggagctgcggaagagcctgctgccgcctctcatcatccacacggccgccacacccatgtcgctgcccaagagcaccagcacgggcctgggcgaggcgctgggccctgcgtcgcgccgcaccagcagcagcgggtcggcagagcctggggcggcccacgagatgaagtcaccggtagggggtgcatgtgggtaccctgatggtgggagatattccaaggaggacaggaggaagagaggatggaggcaggcgggtccaagggcacagcccctgccccatgggctggatggggcctgggtgtgcctggacaagcccctggggaatctgcgccggtgatgcaaaccagggtaggagccctagcctgggggctgaaaacagggcctaagctgacctcttctgtaccctagctgagtgacctcgggcaagacgccaccgctctgatctgcttctgtaaaatggaggtggggtgtccatacctcctcaagactgaataataataatagcagaccctcatctaggtactgactctgtgccagacactgttctaaacactactccgaagcattctaaatgcatttaatcctcacaccaaccctgggaggtaggtaccacaatgatccccattttacagagggggcctgagcctcagattgcagaagggaatggcagagccagcattttaatccaggaggctagtgttggtgcccatgctctcatgattttatttatttttaatttttttaaatttcgcttttaattgacaaatactaattgtgtatatttatggggcacaatgtgatgttttgatatatgcatacattatgggatgattacatcaagctaattagcatatgcatcacttcacatacttattttttttgtggcatgaacatttaaaaatctactcttagcaattttgaaataaatatgcattacgttattattgactatagccatcatgctgtgcaataaatctcgaaaattgattcctcctgtccaactgaaacttcgtatcctttggctaagccttccccattggtcccatccttacctctcccaaccccagcctctgctaatcaccattccactctctacttctatgagttcaatttttttggatttcacatataagtgagatcatatggtatttatttgtctttctgtgccttgtgtatttcacttagtataatatcctccagttcatccatgttatcacaaatgacagtcttcttttttaaggctgaatattattccacagtgcatgtatgccatattttctttctttctttctttcttttcctttccgctctgtcgcccaggctggagtgcagtggcacgatctcaactcactgcatgcaacctctgcctcccaggttcgagtgattctcctgcctcagccacctgattagctgagattataggcatgtgccaccatgtccggctaattttttgtatttttagtagagatgaggtttcaccatgttggccaggctggtctcaaatacctggcctcaagtgatccacctgccttggcctcccaaagtgctgggattacaggcatgagccactgcacctggcccatattttctttatccagtcatccattgatggatactaggttgattccatatattggctattgtgaataatgctgaaatgaagatgggaatgcccgtatctcgtccacatactgatttcaaatcctttggataaatacccagtgctggaattgctgggtcatatggcaactctatttttaggtttttgaggaacctgcataccgttttccataatggctgtattaatttacatttccaccaacaggacacaagggttcccttttcttcagatcctcaccagcgcttgttatctttcatcactttcataatagccaatccaacaggtgtgagataactcattgtggttttaatttgcatttccctggtgattagtgacgttgagcatttcttcatgtacctgttggccatctgtgtctccttttttttgagatggagtttcactctgtcacccaggctggagcgcaacagttcactgcaacttccaccttccaggttcaagtgattgtcctgcctcagcctcctgagtagctgggattacaggcgtgagccaccatgcccaactaattttttttatttttagtagagatggggtttcaccacattggccaggctggtttcgagctcctggcctcaggtgatctgcccgcctcggcctcccaatgtgctgggattacaggtgtgagccaccgtgcccagccctgtgtctccttttgaggaatgtctattcaggccctttgcccattttttagattgggttgattttttgctgttgagttgtgtttcttcaccccattatatatactgccactcagctgatgataacacttctctcaccaaataaatgaggaatgagctctattgccatatctagtttacagatgaggaaacagatgcacagagaggcttaataacttgccccaggtcacacagctggttggggtgagccaggatctgaacccaggcatcagagtccagagctcctgctcacatccctacacttgatgtgatgccagtgaggctcccaggagaccgggtgcacatgagaggacagggctgctgggccctgcctgagaccactcctcccctgctcacccacagcccagcgcccgcagctctccgcacagcccctggagcgctgcaagcagctggaccagcaggcgctccagccggaacagcctcggccgtgcacccagcctgaagcggagaagcccaagtggagagcggcggtccctgttgtcgggagaaggccaggagagccaggatgaagaggagagctcagaagaggagcgggccagccctgcgggcagtgaccatcgccacagggggtccctggagcgggaggccaagagttcctttgacctgccagacacactgcaggtgccagggctgcatcgcactgccagtggccgagggtctgcttctgagcaccaggactgcaatggcaagtcggcttcagggcgcctggcccgggccctgcggcctgatgaccccccactggatggggatgacgccgatgacgagggcaacctggtgaggcccctgtgggcacagtgacccctcacccctgaccttgaaagaggggaggtgtgcctggcctggcagggtataagggagttaccattccaagcccacggaatatcaaggggcacctagaaaccgagctccaaacaatcccttttctccctctgcccgccttgccaagccccagatccttgtcatgcctatgcctggggctgcggctctgccacccttggtggatatgaatgattttggacagatgtgtatgaatctttcatggccctccccctgtgactcagaaagacccatcactcatctctccaaactgatgccccgcatccccctttctcgtctcaacctcatcacaagccatgacttcccactctatccatacccatgtgcccctgccccagcccctcatcaccaccattccccctggggatggggtgcagtgacctcagggttagcatgtgaagagcagggccagtgtctcctcagctgaggtgtgtctctgaacagacagctgtgtggggccagtgtttgataactgatgctgcttcccagctcagcagggaggacaggcagggggctgggctggaggcaggggtggggagaggggagagcggggttggggatgcaggggaggagagggaggaggtggagaggcaaggggtcctcagggatggggagggggcctggcaaggttgacagggagatgaggaggtggctttaggaataaaggaagagaggcagggcagagcttgggccccaggtgggagagggtagacaaggagtgaggctcgtgactctgctgaggagccaggagccggggaacctggaggcctggtcctgctcatactccagtgtttgttctgcagagcaaaggggaacgggtccgcgcgtggatccgagcccgactccctgcctgctgcctcgagcgagactcctggtcagcctacatcttccctcctcagtccaggtaagtgacagggcaggggtctgacctgtgtcccgacctcttcttctcacgggaaattaccgctggtgatgctgtcagggatttgagaagtggcaccctgcctggggtgtgagcagggtggcctcagctgggagggctctggaggggcaggggctgcgggcggtgcctctcgttgccacctgccctgcctccccctctcagccgttgcctccatgcctgggcaggttccgcctcctgtgtcaccggatcatcacccacaagatgttcgaccacgtggtccttgtcatcatcttccttaactgcatcaccatcgccatggagcgccccaaaattgacccccacagcgctgtgagtcaccagccccgctcagggcaaggcctctcctggggtttgcactcaggaccagtgagggaggcaaggaggccacagttgctgacctgcaagtcacacagcagggaacgagggggccaggactctcctttaggtctctcaccagatcctggtccccgggatgccccctgtgtcctctcctgcctcagtttcccttctatgatacatcagcccagctgggtgctttgtctcattccaggctatttctcatgagccagagccttgtggggcacacgcgtgagtcggggagtgctggggcggtgcaggggctgtgtgcagatggggaggcatcttgcccagtctgcctcagggcctcgggggcatgcagagtggccatggaagccgttctttgctcctggtcatccttccaggtcaaaaccaagtagattttcaggggccatagtggggacatgggtcacttctgcttggctgcgaacctgtcagtccttctcagaaggagagccagaggccctggacataccgccccagggtcgaaccccttcagggtgggcccagctcaccctgggagctgtctcttcctagcctggcattatagcccttcgctgtcggcagcaattctggttccagaaggatgggtggggggtggttgtgtttccgctcacggcatcctgcaccacttgcttagaggtggccagggtttgcctctcatccctctttgccatctcccacaccattgtttagatttcagcgctgctggggcttctgttttctattagggtcggggtggagggagcctgaggaatggcgggagcagcccaagactaggcgggtgagagagcacccgcactggggacctcacacccggagtcacagggtaaggcaggggcgctggctgcactccagccttggctgcctcccgcctgaggccctgctgtagagctctctgtcaccatgtcactgtctccacgtctctctcaccatcttcccactcagcttctccatctccagctctgtcactgtacctgctcctctccttccctcctctctgtgctcacaccctgcccgccacctctctagagatctgcgcctgcctcctggccacccagggagggactcagtccacagatgccagggaactagatggccttcctccctgccctgccccagcctgtgcctgggggtgcagagtctgtgtcaggaccccagcttccactgctgctccatttctggggtgcacagcaggaaagcaagtgaagagggtgggatggcaggcaagggtcagagatcaagtgagatcctgccccagtttttaaaaggaaccagggaatagggcttaggacgtgggacgcagatcacagcactgcagtgcagatcctctcccccttgggctaagtggctgtgggggcggggagctctggtcacagacaggggtgtgactgtccacagagctgcaggggagtcagggggcctggcactggctctgtgcgtgtatgagaggggcgtgatctacattgttgtggagggtgggggtcgttttctgagtcaaatgttagaagcaggttttgacttgtgtatgcagagcagacctggcccaagggtgggggcttcctggcgggcaacccctgcctcccctctcttgcaggaacgcatcttcctgaccctctccaattacatcttcaccgcagtctttctggctgaaatgacagtgaaggtgatgggggctggtgttggcttgggacctctggttcctggtgggggtggagacagcttgggctgagggtgggagggttggctgcagcgcagggagggcggccgatgacgtggcggtggtccccaggtggtggcactgggctggtgcttcggggagcaggcgtacctgcggagcagttggaacgtgctggacgggctgttggtgctcatctccgtcatcgacattctggtgtccatggtctctgacagcggcaccaagatcctgggcatgctgagggtgctgcggctgctgcggaccctgcgcccgctcaggtgactccctccccagcactggaacacctccaagaggtggccccctccgcagggacatctcccaccgccagcactccctgccacgaaacaaaagcctgcacaggccagcatcctgtctgtgacccccacaggcgatcctgtccccgccccagacaacactcagattacggccgcagtaatttccctccaggtgcacacctgctttcctcctcttcaacatgacatattcctcagggccgctgcaccatgtgatgtaaggtgactgcagccctgtgcagcacacagcacaaggggccacgagcaggactctcacagtcttcagctgcggctctcccttgtgtggcctctaggggtgacactcagcccctccccgtgaggtgacaggctcctcttgctggctttccccatcttcaggcgcctgccagtgaccaccccccggtgacatttctcctgaccagggatccaccctctcaggaatccctttccaatcagccagtcaccacccccaactcagattttttttttttaatagggatgatgtggactaatggcgatgcttccctgactgtgatagtccatctccctctgccccttcccctctctgcctgctcccctacaagtttatctcctggtgcccccaacccacaatacactgcatctctagggaacgcctcacttgagttgaatcctccccactcccaacccaaacaggtcgtacatttgacatcctgggatggaggtggagatgtggggcatggggatctctgccacttgttttgagagattacaataggggtcctgatggcaggggtcccatgaaaagaggacttgtgttctgccaccagaggccaggaagggaccagtggtcaaggttgggggtggggagcagggtcaagggacaagggagggtctgggctgggggaagccttatcacctccctccctcccctccccagggtgatcagccgggcgcaggggctgaagctggtggtggagacgctgatgtcctcactgaaacccatcggcaacattgtagtcatctgctgtgccttcttcatcattttcggcatcttgggggtgcaggtgtgtggggttctgggggccagctgtgggtgaaagcctgaagagggcccttccccttggcccctgggtcctatggctcaagctgctgttgctgccttcattccagaaaggaataagcagggacgcttccctccaggctctaggcccttttacctcctgggcatttcaaagaaaagtgggagcctagaggaaggccccaaggaggaccggggctgccgagaggcttcaggccatgggagccgcaggctgctgttcctgccctctgcacgcactccctgagcacagacgctggcccgcggtctactccgggatcccctcccttccttcccggctcgagcacagtgggctgcaggccaggtctggggatccagggcccagacagctgggccaggttagcagcgtgctggcaggcaggcgggtgcagaccccagacgaggcaggaagtgggggctgctggggaaacttggccttgggcccagggaggagacttggctttggaagagaaagagccagagctgcctgcaggattcagcagacgcctcagggggccggggagcccctccatcatagtcttccagggcccttggctccagctgtttcagctgcagggtagacagctggctgttcaggcagcgtgggagcccctgggtggctacaccctcccctccccgcccctcgttcccttggcttcctgggatgtccactctgccctgggttgggggctgttccctgacttcctagaaattctctagccctagggaacaggctggggtgcatttaccaaagctgtgtggtgcctctctgtacaccctccccactcccacccagtgcccttccccttcctcacttcccagcctccttgggtcagtagagtgaagcattgttgagcccagtccttccggtggatttaggtctgttttgagcagtttgctcaggccccctggtcctgccttccgtttttcactagtggtcatagcctggtttataatggaatgagggtgagctttccaatcagacagacctgggttcgagctccctttctgctacctgctggctatgggaccttagtgagtggattaacttctctgagcctccgttgttcttatctgtaaagtggggttgatgatacccactcccccacccagagctgctgtgagaattaaatgcccagctcagtggttctcaaacttgagtttgcgtcagaatcaccagaacggcttgttaaaagatcgctgctcccccacctcagagtgtatgattcagcagatctgggctggacctgagaagatgtgtttctagcatgttcccagatgatgctggggactcccacttggcacacgcctggcctaaccgttggtggaagatgaatgactgttacccgcctccaccctttcccactgcccgccccgattacctttcctccccactcttggaaaggaagggggtgtcggcaggggagactcttgtcagtgtttccctgacttgactggccccagagcagagcaccccacactcactcaaaatgtgcccaggctggcgtgggggtggggctcaggagtcctgggcttcctgtggtcacagctcacttttctctgtctctgggaatgtgtgtccagctcttcaaagggaagtttttcgtgtgccagggcgaggataccaggaacatcaccaataaatcggactgtgccgaggccagttaccggtgggtccggcacaagtacaactttgacaaccttggccaggtgagccccaggctcagaggtggggctgtggtgaaggaggctggagggggcacagggccatgcttagtgatacctgctgactccggtggaggtgggctccacgaagagatcagcccttcacaccctctgctgtctaaccaccagcatgtcgcaaagcccagtccatcccacagtgccccaaaaagtgggcccatggggtctctagccgtccttaaagatgaagaaacagaggctcagagagggtaaggggcttgcccagggccacagagctacatggtggagcaggaagcacacgtggcagtgggggcaggcagccctggatgtgaatcctgtgcaaatcctgaccccaccattgtcagctcaatgacctggagcagctgacttaccagggcctcagtttcattaactggtgaatggagtcataatagaatctcctcggaggtcacaataaggatgcaatgagatgatgtgtatatttctttaacatggtggaagggacggatatattgtcaagataattcctttcctcactccatatttgcagaaacagaaatgcagaaaatgaaattgctcgctcagttttgattcccagacccactctggttttggtttctggatttccagggtttttgtgtcccttctcctacctggcggagggcagagggtgtgaccatctctcagggcccctccagctgcagctcagttatggaaccctgagagggagggctctcctggagcctggagtgtgactccagcttgacccctcaagggctggggtacttggagctgatgcaggaggcactttgggggcaggtgataggtgattcagccacacatcctagacttcaaatgtctccttctcctcctccccatcaggccctgatgtccctgttcgttttggcctccaaggatggttgggtggacatcatgtacgatgggctggatgctgtgggcgtggaccagcaggtagggctgaggtgggcaggatccatctgtgggctcaggtcactcagcatgggctgattccaggacagaaagagcaaggcagggtggcaaaatgccatgaaagaagcatcatattttacagcagaggctgttgctggtagcctgtgggccaaatctgggcatgttttattggtctacaacatgtttaacatgttttgaattagtgatgaatatttttaaactggtgaatttgggctgtgtgcagtggctcacacctgtaatgccagtgcattgggaggcctaggcaagaggatcacttgaggccaggagttggagaccagcctgggcatcatagcaagacccccagctctacaaaaaataaaaacaattagccgggtgtggtggtatcatctggagtcccagctgaggtgggaggatctcttgagcccaggagtttgaggctgcaataagctgtgatcgcaccactgcactccagcctaagcaatagaacaagaccctgtctctaaaaaaagaaaaaataatggtgagttttacacagaaattcagatttgtgtctactcaggaaaagtctgaagatctgggaagactgggcttgcattccctcaaggcaggagtcagccagaacaaagaggcagttttggatggagaatctactctcccctttaccacagtccccgcccctccctactgcttcacatcaaacccacaccattcatttccatcgcctgtcaggcggctgtagctatttgggttcgcaggaacccaggctgtgggcagctcctaagacagcttgccctcgggctgatgcctccgcctgtccttcctgctccccgccagcccatcatgaaccacaacccctggatgctgctgtacttcatctcgttcctgctcattgtggccttctttgtcctgaacatgtttgtgggtgtggtggtggagaacttccacaagtgtcggcagcaccaggaggaagaggaggcccggcggcgggaggagaagcgcctacgaagactggagaaaaagagaaggagtaaggagaagcagatggctggtcggtagtctttccacctctctctgggtcgtgcttgaccttggccttgcgactgcagggggctgggcgctggggccgggggcagggagaagaggctcccacccccctcctcacctccttctccccaagagcatgtctgcctttagagcgagcatgaagcagaccacttcagccccatgggtagggggagctgtccccaccctggggcctcccaggacctcagcatcatcctccccagatgatgccaaatggaggttgacacccagcctccccgagcttgactctcagaggagcctcactggctgctccactgccccatgccagcatccagaggcccagggtgggcagcaagcatctcaaccctgcacccacctagtgtctgcagctgccgagcaaagcctcagcagatctcagtaatggacaacagcgtaaaagagaacccagacacccctccctccctatctctaacaaaactttctaccatgatatatatatatatatatatatatttctgctaaacttaaaaaaagaaaaagcaaaaacaaaaacaaaaaaagaaaactccccttggcttggggaagttctggaataacctggggccctggagcccctcacctcctcacctgtgctccccagcatctcttggcattgggtgggtgaagcccccatccgtccgtcctcatgcccttatgccatgggtgggccgagactaagtgagaagacagaggccaggaaggatgtgagagacacagcaggcgcccaggcccctttgtttctggggcatccccagatgcgtctgcacctgtctccctctctcccgggctccagggctcccatctgcctggtacagcgtaatctccgcgcctctctctctctctcagtcacggcccacgtctctctaagtgtctttgtgtgtgggtttatctaagcctttgtgtgtctgtctgtgtgtctctctctgtttggggtgagggtttcccatgctctcttcaccttttcacaaatcgtcttccttccgccgataagatgggtgcggtggcctgagttttcctttggtgtgttcacatgtgagtaccaccaaatgagtgaggggttgccgtgcccctgcctcccctctgccctcagctctatctccctcggcctgggagtggcactctgaggcggggggagagtgtgggagttgcagacgagggtggaggtgggagggggcctgtgttccctgtgaagagcgggagctgctccaggatgtgggggagacactggcctctgggcagcaatgggaggtgccgttctccacgtccccaaccctcactatcagcacccccaaggccttctgctcggctcagggtaggggtccgggttcggcttccctgtggatatctgcagctgagcaggtgcagtgtcccctgtggccaccgtcccactcctgctccatcctccccacccccacctcacagtcaggcagatggaattcttttggcaggcggcacttgtggcccctgcctgcccagctggctccccttctggggtctgtagctgtctcaggtgcagctgaggccacaacgcaggagaagcggacatctgttctgatgaccggctgcctgcccctcccggtgcctccctgccccgtgaccctgaccagctagccacattgcttgtcttcctcaagtgccctgtgcccccagcttcgggctggacattcagagccagccacccaatgggctcagcgcaccccacccataggcagagtgaggtgggagctgaggggaagccgcccctgaggggccctgcccagcgcacctggtccggccagtgaccaatgtcgtgtttcgttcttttagatctaatgctggacgatgtaattgcttccggcagctcagccagcgctgcgtcaggtactgcgtctggggtgtgggctcatgcgtgtggggacatgctcttcactccctccccgtggctcattgattctatcctcttggggtgaaagggtgagggtccctggggcccccaagagggcaggggctgaagcgctgggctctgcagcatcccgcaggcctgcgccaaactggacgggaggcgagggcctgaggcctctctgccgacgccctttggagagcccaccttcccagcaagggcttccttggccggccaagctccccacctcctgccacctcttccctcctgtgcctcctccttgtagctcaccggtcgattattagagctgcaaatctctcctgtctccttttgtctgaggggagactttgatccaagggagcaggatgagaggagcagagaggggaaggatttgttttaaaaatgtaacaatgaataattgaacagactcattaatagtcaagtgatcacggtggctgcgtcatcgctacaaacagcaggaattgggaatcaaaggcctgagttggccacgagcttcttccaaaaaaagccaaagatttgggagtgacttgggtccttattttcaagagccatgtctctgggaagactctcctggtccagcccaccctccatggtccctcggtcccctgctctcctctcccccactggcccccagatggaggtgtggaggctcatggagtccgtggcagggctgtggggcctcataacactatgtctccagctggtggttcccaagctgttcatccccaaggcccccagttatcatctcctccaacagacttcacactttagaaggctgtctatgaagttaagagcacttcaataatgactttctttcatcatttttactaatcagaggcgcatctaattgctaatcacagcttctgagctgcagaaggttacacactaaatgatggcaaagaaagaccatttcgtcattaaattagtctgtggggccttaacacaggcaaagtatagggtttctttcaagctttttgaagtattggaaagaacataagggccgggcacagtggctcacacctgtaatcccagcactttgggaggctgaggcgggcagatcatgaggtcaggggtttgagaccagcctggccaacatggtgaaaccccgtctctactaaaaatacaaaaattagccgggcgtggtggcatacgcctgtaatcccagctactcgggaggctgaggcaggagaatcgcttcaacccgggaggcggaggttgcagtgagccgagatcacgccactgcactccagcctgggtgacagagcgagactccatttaaaaaaaaaaaaaaaaaaagagagagagagagtgagaacataaggacccccatggctgctgcaggcttggaacttcagtctgggaaccaccggctccactttccccactcctctggaagctagaatcaggcagatgctgccctggggatgttgggtgtcatgatctgtggggcctcagggacccacccaagagagaacccctgagcccccattgagtaggtcatccctgaggccctcagcgctatggccccatgatgctaagcagtggtgtttggcattgagagactgcctctctggggctcaggagtctctggctggtttgtgtctggattgccagggtccccacatctctgcatcaggctgtcttgcaaattcctgacttgttaggggatgaggggagggagggaagaagtggccttcagcttttcccttacgggcccacctggtctgtagactgaagtgtgcacactttcacactcaccccaaaacatcctagcacagggctagcccacagagacttttccaccttgggtgttatcccagaaatcaacacatgcagactctcatggctcctaagacgtgactcacccactcagtgctaaacactctcgtgacccttgcactgcactcccattccgggtaccttctgctgtgctcctgaagtggatagaccccactgtatcctggggtggcacacgcaggcatgtacaccagttaccttccctggctgttggtgaggactcagagaccccgaacaagggctcaggtcatcccatatcccacttcctaggacctggagttctgcgtggcctatgccagagcttttcaaacttccatgtgcataagaatcacctggaaagcataaacacagattcctggggcttaccccagaggttctcctacagcagtgcagatgcactgatctacccaccagggtgatggggacagagtcaaacgcagtccagggctgctgagaatcaaacacgtgcaccgcacctccctgctagcactcctgtcctggtgctgctcccagcaggggcgggagagccagaccctagggaaaggcagaagagcggagcctgtgattatctggggaatgggcctgaccagaagcctgggtccaccccggcttcccagatggagggagggaccggggctgctgggtcatcaggctgccccacgggacggctaagcctccaacaccagctccactctccttggccacctgtggcgtcgaccttcactcactcaccctctttccttccaccaggccgggacccagtgatcaggcctggccacggcagctgaaggtgtggcctctgccgtggggggcctgtgtccttgggagtgacccctgtcttctgcctactcattgccactcccctttgcaaaccctccgccctggccatgccttgggctccctgtgactcctactaactcactgcctgttgccttgcggccctccttctgtacccttcctccctccctgccccgaagtggggacctgggctgccctagatatgcccttccccccactgtctgactctggtattttctccacctaaggcagctcatcctggtgggaggcagggaggtggtgccacagctaccaatgcatcagtgaccacaggtccaggctcctcctggactatggttggagctctcaaagcagcaggcttgcccaaggctcctcccaggggctttctatttcttctccacacctgggtgcttgcctgcagagccgaggtccagagagcagcaaaggagggtggcatcgccaggccccaactttggaggcctttgggcagaccatccaggggtgtcctctgggccaaggcctcaaagccttgtgtctgtacccacctggcaactggcgagggactcgggctggaagttcgggtccagctcggtcatgcctcgtagctagctgaatgagtcactttttgcctggcttcattctctccctctgaaaaacaaaggggttgcccgaggagatgctgatcagattggcctggtactctttggacctgtgctctaatgggggatttctggcagcctcagcacctgccgtctggggtaggggccagggtggaggggtgtttgtacagacctcaggggccgggacctgtctataagcagatgccctgcctcagtcctcctgccccgccttccttctgggcctcttggaggagggtcccggctgaattgaagcccacccaccccacagactcctagtgcaaggccagagttggtgggagcagctgctccgtttggcctggaactgcctacagagtcaggctggggtgacggggagaggagggcaactctcccagcctctcctctacattgtctcagctaataatggggctaataaggagccgctttttctaacctaattgtattcaaacattttagttaattctccattcatattttagcataatgggatcgggtgctctcggcatttatggagattaatgcagagaaaatgttccggctgctcaggcaatgcagggcgactagcgccctctggttcttgtggtactcaaggaaggaaggaagaggcccggcccacccggcccaccctccaccatcgcggtgtggatgacccgtagcctcctgtcctcccttgccccaggctctccagccccacactcttggggctctgttctcgaacaaacagagccacagttggctggccgatctctgaaaacaggaagatggcctcatgcatgcctaaggcgcagcagagtgccggggactgtctgctccgtggtcatccacacctcaaggccgatgctggagagtggccaggtgggccaggagcatggcagcccacgaggctggatgtgcaatacctgggtgctcttcttccttcagcctcgggtgggggcccaccccaggccgctccttgcctcagtttacctctctgttcaatggtcctgtgcatgggaaaggacagttacatctgagctggcctgggcccaaagcttcctgctgcccctaagccagctaccccctggctcaggcctcagaggcggcagccctcactggctggcttccccctagacctcctgagacggggaagggctgtctgggacctgaggctgccacacacctccccgtgaaaagcctcttccttctctgtggcttcgtgggagaccaatctgtcaacttcctcccaagaacatgtgccccaagttggcctggcccttcctcagcacctggaagagggcccccctgaaatctcctgcccccagatttattctgcctccttggcagcccaaccttctggctctgtgattttcataactaagtggttcactaattacgagagaaatattatgcctctgacagatctcagacagtgcttccagcccagcctgcagtctaaggctgcccaaacacccaggagcaggctgggcagtgcctcattagaaactgggtgagtccaacaggtggggccctcccagcttgagtctgggatggagcagagccccaaggcctcccctcttgctctcactgacatgagggtacaggaggcccaggccccgccttctggaggccctctgggtgggtcagtgcagccagccaagaagatgtccaatttccaatctccggttttatctccaaatcccagctctgtgtaatctcctctgctcccccgaggggctgagcttggtgaaggagcaaaagcctttgcctccccgttgatggcgcgtcctctgagcctgaggagaccagttgtttttcatcgtatcgatctggccttgctgcggaacactgagtcgagggtgttatgaggggctggtggattttggaggctgcctaggggagggggctcacctggcgtctaatgtaggtggggggctctgcatgtcctgatccatcctgccctcaactgcagccagtacaacagatgcttggagggggacacgcccagacggctgcccccaccaaggggcagcgtggggagggcgaggatggtgatgattatggaatgtttcagttctggcgttagaggctggtggctgtgagggactgggggtggaggggtgcggggggcaggggcctgacgcttgctctgctcttccccctgccccatcagaagcccagtgcaaaccttactactccgactactcccgcttccggctcctcgtccaccacttgtgcaccagccactacctggacctcttcatcacaggtgtcatcgggctgaacgtggtcaccatggccatggagcactaccagcagccccaggtaggagcgagtggaccagccatctggcccccccacctccagctgaggaacctctgggcaaggttaacacagcctgagccagggtacctctgtgccaagcaagtgctaggcacactacatgggttcctcttgtgccccttggaggtgggtatcatctttgttttatagatgaggacactgaggctcagagatgttagttgatgtggccaaggtcacacagaaagggagtggaggacctggtttcttcatccagcaaatgttgagcgtctactatgagctgcgctctggatctttgagggtaaaaaggcagatggatgcctgcccttctggagttgagattctagcgaacgtccagctccagagctcacctgtgaccttgccacttctccagtcagcctcccttggctgccttccagccgtcggtttccctgtccatccaatgagggggttgaatttgtaatgcacaaggccccttccagtcctggcatgccgtgtcatctagtacattctcatgtgatctcctcaccatctcccaaggagaaagatcctttagcataaggttgattcattcatgtgaataagtgccctactcccttctggggtttggtggctaatggccagccatcatgatgggaacagagaagacagggctccttggagttcccctgcctctcagacctgggcggtatgatggaggggcggggggacaagccccagccctgggccttaagggaccctgcatcttgcccccatccctgccagattctggatgaggctctgaagatctgcaactacatcttcactgtcatctttgtcttggagtcagttttcaaacttgtggcctttggtttccgtcggttcttccaggacaggtaacggagaaaaggggggtcttggggacttgcgtagagatagaaaggaatgagtctcttggggaaatacccaggaagacctagtgtctaagacttttcttaattcctgaggttcagcccccaccctgtggctgacgtaggggactaggggatgggaaggcatggtctccaggaccaggagatgggaaggcatggagagaatttgacaagacagggcctgggggatgctggcagctagaaatcagtgtgacctagcctggggcttaagagcacagagcctggagccagactgcctgaactggatttgaatcctggtctcaccacttagtagctggtggccttgggtaagttacttaacctctctgtgcctcagtttcctcatttgtaaaatgagagaaaataatagtatccacatcacagagttgtgagattatgaattcctatttggttttgagggtgtttttcgttttgttttgttttgttttgttttctgatgcccaggctggagtgcagcagctcagtcatggctcacagcagccttgacctcctgagttcaagctgtcctttcacctcagtctcccaggtagctgggactacgggcacccactgccacacgcagctaattattttttatttttatttttagtagatacagggtctcactatgttgcccaggctgttctcgaactcctgagctcaagtgatcctcccacctcagactcccaaagtgttgggactgcaggtgtgagttcctatttgtaaagctcttaaaagtgcctggtgcatagtgaacaccatataagtgctaaattaaaaataaaagcaaatgaatacaaatgaaaagcagaggcttttgagctaaagtcctagtcctactcgtgccaccagttggctgtgtggccttagataagccacgcctcttctctgtgggatgggaggctggacccgctgatgtctgccctcctttcaagccctgtctttctgtgccacgactgccccctccttcaggaaccccctcccccaactcagggagctgtattctgggctttccaggtggaaccagctggacctggccattgtgctgctgtccatcatgggcatcacgctggaggaaatcgaggtcaacgcctcgctgcccatcaaccccaccatcatccgcatcatgagggtgctgcgcattgcccgaggttggtgcccagcccacgcacctgccctcctagggtgaccagcccagggagagagagcaagggtcggctttgtggctggtcaaggcctgggcggctgtgggttcccatgggtctttctcccagcttctgccaagggaggctggagacagggctgaggatggggatgcaacctggctggcccggagatggccatcccagcagccccagcccagccctggtcctgactctgccagctgtctggccggggacccaaagaggccagctcatgacgttgtcctgttctgcagtgctgaagctgctgaagatggctgtgggcatgcgggcgctgctggacacggtgatgcaggccctgccccaggtagccgggaggtggggggcctctggggagggggaggtgctttccagagggaaggggctcagagaagctgactgggagacccagcggcatcgtttctatttcttctccttttttccaggtggggaacctgggacttctcttcatgttgttgtttttcatctttgcagctctgggcgtggagctctttggagacctgggtgagttggggtaggggagggtggaggagccagggctggagaccagggggctcctggactaacatgggcctctccccctttccctcctcccccagagtgtgacgagacacacccctgtgagggcctgggccgtcatgccacctttcggaactttggcatggccttcctaaccctcttccgagtctccacaggtgacaattggaatggcattatgaaggtaagggcccagggttggcctaggctccagggaggcagccccacttcctgagctaggattccttgggaagatgaattggccacaaataaaagcatgtgaccttctctcccccgtgctagaacactctggaactccctctcccaggaacatgctctgactcacacttgtagtgctcctctgcccccaaacactccctcctcctccccttccttcccatcctccaatgctctgtgacaccagtgacctgattttccacaacagctccaacaactgtcctccccagcctcacccctctattccaccctccccaggacaccctccgggactgtgaccaggagtccacctgctacaacacggtcatctcgcctatctactttgtgtccttcgtgctgacggcccagttcgtgctagtcaacgtggtgatcgccgtgctgatgaagcacctggaggagagcaacaaggaggccaaggaggaggccgagctagaggctgagctggagctggagatgaagaccctcagcccccagccccactcgccactgggcagccccttcctctggcctggggtcgagggccccgacagccccgacagccccaagcctggggctctgcacccagcggcccacgcgagatcagcctcccacttttccctggagcaccccacggtgagcagacacccaccccagccgtgagaggagctggggcaggagaagggtgtggagggtggtgggcgggagccaagcgggcagcacacaaaccctaggctcctcctggaggctcccgccctccgtcctggatgctgagcgagcagtcactgcccctccccagggatggctgcccacactcaccccacagggccaccccagcagacgggccagcttagccatgccctgctcctccagcctggtctggcctccccttcctgactcataggttcaaggctaagttttctgtttccttcctgtttctttcttacccttgcccaactgccaaatctctttcctacccaccctttaacctgcctgattctcttccatctctccatccttttatcttctctttaccgctctctctctctccccccgccgtgggctctgctcattttccatctcccatctctccttcctccttcgccttccctcttccccaccccctcctctttttctctttgttgctgtgtgtgtttttgtgtgtgtgcacatgtgcatgtgtgttgtctgggtgtcacctctttctcctctgtttctcttgtcaatccccttccacgacacttcccatcactgccctctgacccctgctcccctgcctctccggctccccttacgggctggctccccaggacaggcagctgtttgacaccatatccctgctgatccagggctccctggagtgggagctgaagctgatggacgagctggcaggcccagggggccagccctctgccttcccttctgcccccagcctgggaggctccgacccacaggttactgtgcccctgtgctgtgccctctcccctgaccgtgctgggctgtgccacgctgtgccatgcttctggggaagctgggagtgttcctgcccactgggtatctgtagaaagtgcagccttggagcctcagttgagtgcaagaggcagtcaggggttcttctagactgagatcacctccagaaaagagctggaaggcagggctgctgagattgcccctctgatgagaagggtgtgtggaggaggagcttggggaggggagaggggatttgtaagaatctggaagagaaaagaggggatggggcagaagataagttagcagggggaccttagggggtggagggaaggaggtatcagatccagggaggaaggcctccagagacagtgtaggtggccagggagcccgctgccaagctgcagtctctctatctgctcgtgtccagcacacacttgccagtcctcagtttggtggctttttaagccatggagcccactgggcatggtgagtgctgtcaggagccactgatttctgtcctgagagagatagaaggctccagctgggagtggattttgagaacttggtgtgaaataggacttggcttcctgcccaagcccagccccttcccacagcgccacatggccctctcccccagtcccatttaattccaggtcttctgctttctgggctgttcctgccctcctcccctccccttgatcccctcaccacgacccactaccacgtgagagagggccccaccctccctccacctaggtgagaggctgcagacccggagtggagacaggtgtcagctgcagatagaaaagccgagtcctccagaggcccttttgggtggtggggcaggcaggttcttaggaagcctttagcctgatcccagaaaaatggacagtgatcctcatgtgggaagggaccttgcctcttgttgggattcagtctcagatctggcaatgacctagaatgatcagtgggaaagtgagtccctttccgaggcctccccttcctgaaagaggctcacagggaaaggttgtgggagaagaggacacgatgggaaggtgatggggttctgggagggacggtccaactgtcccctagcatcctgtgggcactgaggcaaccccctgggtcccaggtgagccagccagatggtgtggcagcccacccgagtgcgcccacttcaggctaacgggagaacatctcccagagcccaagttggagagggcgggcgggctgcaggcaggcggaggagggcccacgaggggagaagccagaatctgggggcaggccaagtcctgccaggctgttggaagccgagagaataggcagaaaacagccgtcagattggtggcattgtcgccggcgccccccgtgccgctctgtctgtgccgggaggagagacagtgctttgctggcctttcttcattttttttttttttggtatcatctttttgagagtcgcaagccctcggtcctcccgctccctccctgggtggtggtagtgtgggaggggctggggaggctcctggggtatctttagaatgcgtttctgtgtctcctcgctttgtcagtgtttgctctggctcttcagtgcctgccgcagcctctctgatcagagcagggggttgaagtgggtgcggggaggcactgtcagcttgtttggggaaagggtggggagagagaagggatgcctttttcccgcccccctgtgcttcgtgaaaagggggaagtggggactgagagagagcgcgtgtgtgcgtgtgcacgcgcgtgtgcgctgtcctggtttctcatgcctgatcatctctctccctgtctagatccctctagctgagatggaggctctgtctctgacgtcagagattgtgtctgaaccgtcctgctctctagctctgacggatgactctttgcctgatgacatgcacacactcttacttagtgccctggagagcaatgtacatacacactgccctcactgctcccggccacccccggggctggactggctgcagggctccagatcggcccagggagggtcctggggccgcctcctctcagtttgctgccaggctccacccagaggcatcaactgtcaggacctcggtggcccacgctttgctggcacaaggtcttcaggttccccactggggacaaagagattagataagtttaaattggggccttgccctgaagggtataggagcagcggcagccattatgaaaaagtgaatccagacacccaggagtgacacggcccaaaacaggtgtcatcagagtcaatctatgaatttggagccctgtgcaagccagccctccctgtgcctgttcccctcctccccaccccaccccaccccccaacaacatgagaccttcacaccacgtggtgggtgagagccgcatctctgccaccgctgccatgcccttcttcacttggagcgctgttcctgtctcctccgtcactgtccccgtgtgtccctgcgtcttcaccaaactcagtggggtgaatggggcttctctgtgctctgatagcttccctaccctttcccttctccagctcccgtcccttctgactgtgagcagccccctcctctccactgttcccctcctgttgtcagaggagggcccagctgaggcagggactggaccaccggctggggtgtccctaggggtcttgggtggctggcagtagtggagcctggggctgagaggggaagcaaaataagattgtcctccaacttagccatcctcaggcctgctggggctatttaactggctgggcctgcatggcgacagggcccctacagcctccctgggaacaaggggtgaagggttcagggggaagggggtcacagagtgatggagaaacctcttgagaacaaactaggctccctcatgctggagtccaaggctgagtacctcccttctctgaaacagagcaacaaccccactcccaccccgagtctgtccactaagggagcagctgaatttggcctccaccctcacctgccagagttattggttaaagtggaggtcagggagccagctgtgacatgcctctggtggtcatctgccattcaactcacctgaacccaacccaggccctgtgctgggacctggggctgctgtaagaactggatgaacagcctgcaacctgcaagctctcctgagctgcctggtccctgctccttgggagggtcctctccccctcacctcccccactgacagcacagggtcgtaggggctgctgttggcttttttttttttttttttttttgagacagggtctcactctgttgcctaggctggagtgcagtgatatgatcccagctcactatagctttgacccccccggctcaagcaatcctcccacctcagcctctggagtagctgggattacaggtgccacgccaccatatccagctaatttttttttttttttttttttttttttttttagaaatggggttttgccatgttgcccaggctggtctcaaactcctgagctcaagcgatctgcccaccttggcctcccaaagtgctgggattacaggcatgagccaccagccactgtgcctggcctgctgttagcttttaatcctcccctgagctgctctgggtcagggccccagcccatccctgtggacaccgggactcccttcagagcctctaaatggggcctttagaatcagcttgtgagccacctgcagggctgggggctgggggctgctctcccttctctggatacctccccgcccctccaccaccacagtgggagcttaaaggtgatacaatgtgtgcagttttgcagggggtggggggcagggcctgcagactctcccggctgcccagaccccctcctacctgcttcctccccgcgtgtggagggctcatccatgtgtctgcccctctccccagccatgctcatgcccatctctaccttgtcctgggagggcacgggggtgagggctgggcggggggcgctgctgctttctgttgtcagcgctgcctcagttaccaaacccacgcacaccctcttcctccacctccctcccctgttccttttgcagatgcagccccaccccacggagctgccaggaccagacttactgactgtgcggaagtctggggtcagccgaacgcactctctgcccaatgacagctacatgtgtcggcatgggagcactgccgaggggcccctgggacacaggggctgggggctccccaaagctcagtcaggtaccagggctagagcaggccaatttggctcacacagggagattccatcctggcctaagccagtcctgatctgaggggatggggaactgaggcagccaaagaggtatctctgacctcaggggagcctccagcctgggggaatggctttgagtccagggggtaagggtagaggccctgatgagggggagagagtggaagggagggctcaggtgagaacctgctcccctgaaccctccagctccattctctccccccacccctcccccgcttccctccctccacaggctccgtcttgtccgttcactcccagccagcagataccagctacatcctgcagcttcccaaagatgcacctcatctgctccagccccacagcgccccaacctggggcaccatccccaaactgcccccaccaggacgctcccctttggctcagaggccactcaggcgccaggtgagcagatgtggaaaggcaggcacaggcctgggggctggaccctctgctgctggtgatgacctgtgttgacactttcattcttccagcaaatatttattgtgtgccagtgatgtgccaggctcagttgcagataccagggacacagtactgggcaaagcagaagtggtctgtgccttcttgaaatttgcacccagttccttgttccactgaggaggcctggagaccagaaggggtagtgcttgcccagggtcatgcctatctggtcggaggtagaaccccagtctctggtctttccttcctcaccaaccagagctgcctcccaattcttctccccactttggactgagctatggggcacaaggcaggttttaagtgtcttcacttttggccaagcctagggcccaccttccagagcccagattcttttttttttttttttttttgagtttcgctcttgttgcccaggctggagtgcaatggcacaatcttggctccccgcaacctccgcctcctgggttcaagtgattctcctgcatcagcctcccgagtagctgggattacagacatgcgccaccatgcctggataattttgtatttttagtagagatggggtttctccatgttggtcaggctgagctcgagctcccaacctcagatgatctggccgcctcggccacccaaagtgccgggattacaggcgtgagccaccgcgcccggccccagagcccacctgtgataaggccacagcccatgccatgtgtgtgtcctgaggcatgagcgtggacacatgagaatctcaatcccacatgcttgggggagcaggcacagtccttattcattctgcaaatagtcactaagcagcctctgtgtgccaggcactggcgacacagcccctgccccctgaagctcacagtctaatagtggagacatgcctgccatcagatcattgcagcctcagctcacagctgccagacacctatgtgtggagggcagcagggacacagaaggggaaggggtcggttttacttggggacagagactgtcacacactgtgtcacagagaacctgagtccgtaaaatcgagggattcttgccaatcaggaagggtattcagagccaaaggggaagtctaggcagaggcggggaggcgtgaaggagccagctcagtgagcagagatggcctggcttctctcatatcccaggaggcaggggctgcagagagagcgattcttgcaggcttaggggagaccagagcatgggggagggaagacagggtttagtggggagagaggaggcatggtggacaacagaggtcaggctgcaatgacccctatctactagtaagagcggctaccaggacctctgcttaggatagtcctgctgtgcctggtggtggtgggcagggggcacagccagcttgacaggagggctagtccatgctggagaggagactgctgggctgagccctcccccaccccatataggcagcaataaggactgactccttggacgttcagggtctgggcagccgggaagacctgctggcagaggtgagtgggccctccccgcccctggcccgggcctactctttctggggccagtcaagtacccaggcacagcagcactcccgcagccacagcaagatctccaagcacatgaccccgccagccccttgcccaggcccagaacccaactggggcaagggccctccagagaccagaagcagcttagagttggacacggagctgagctggatttcaggagacctcctgccccctggcggccaggaggagcccccatccccacgggacctgaagaagtgctacagcgtggaggcccagagctgccagcgccggcctacgtcctggctggatgagcagaggagacactctatcgccgtcagctgcctggacagcggctcccaaccccacctgggcacagacccctctaaccttgggggccagcctcttggggggcctgggagccggcccaagaaaaaactcagcccgcctagtatcaccatagacccccccgagagccaaggtcctcggaccccgcccagccctggtatctgcctccggaggagggctccgtccagcgactccaaggatcccttggcctctggcccccctgacagcatggctgcctcgccctccccaaagaaagatgtgctgagtctctccggtttatcctctgacccagcagacctggacccctgagtcctgccccactttcccactcacctttctccactgggtgccaagtcctagctcctcctcctgggctatattcctgacaaaagttccatatagacaccaaggaggcggaggcgctcctccctgcctcagtggctctgggtacctgcaagcagaacttccaaagagagttaaaagcagcagccccggcaactctggctccaggcagaaggagaggcccggtgcagctgaggttcccgacaccagaagctgttgggagaaagcaatacgtttgtgcagaatctctatgtatattctattttattaaattaattgaatctagtatatgcgggatgtacgacattttgtgactgaagagacttgtttccttctacttttatgtgtctcagaatatttttgaggcgaaggcgtctgtctcttggctattttaacctaaaataacagtctagttatattccctcttcttgcaaagcacaagctgggaccgcgagcacattgcagccccaacggtggcccatcttcagcggagagcgagaaccattttggaaactgtaatgtaacttattttttcctttaacctcgtcatcattttctgtagggaaaaaaaaaagaaaaagaaaaaatgagattttacaagtgaaatggaacctttttatatatacatacatacatatctatctatctatctatatatatataaaataaagtaattttcctaaataaaaagctaatcacggtccagagtaaaagcaaaagggatggagagttaggcacgtccagatggcattgatgagagagagatcctggagatggggagtgggcggcggggagggaagcttcagggctgcctctttgtgtgtgtatgagtgtgtatgtgtttgtgtatatgagtgcgtgtgtgtatatgagtgtgagagtgtgtgtgtctgagagtgagagaacctgaaccccttgctgtggaaggctgcacctctagcctgccctccccagccgtgaaggagaggaggagcccctccgcctggtgcaggctggggaggcagggtctcttctgctgctatcaaagctttacagcttcctctagctaggcagctcagtgaatgggagtaattccagattaactcttatttctgctgacagctatcagccgcacattgaaagctggaaattggcataatgaagctgttttggttaatggggccgactgaggctgggggaggttgcctcagaggctgcagatctggatctgtgggttggtgggggaggggggaagtgtttctgggttttccttcctgaagcttcagcacggatttgccacacttctggctggatgcgtgacctgagctgtctggacttcagcctcctgccttgggggcgggcttagctgactggcattacaggcactgtccgatggggacctcgtccacctgcccgcaatggaattaaaccgtgtcaacggagtgggctgtgcttcctgaggatgagagtccagggctgggcgtccagaggcaacctcctggtggaggtggtagggtcagaggccaggtgctgagtggggagctggccccctgggcggtgatgagcgagcgctcaagatgtttacatgcactgctgctgctgcctgcctagcgggagccagtggaggagggaggtgtgaaggtggccaggggcaggcagacaggaagagggggagtggcgtggcccaggccacctgtctggtgctactgcagacaatattctcttgtctgaaatcttggtgccaagaggtggtgaccatgggtccagccagcctgtcacctagccacctcccaaacatctgtcccaatcccactcccttgaacagccccctcccctcgcccccagggccttcaaaccccaggattggattgggtttttgaaacctcagtggcaacgctcgctcacaaaccgtctgatccggtcaactgggagctgggggcaccaggctgccgggcgagtggacctggaggcgttgtccagcattgttttctaagctgggtgagagcttttctcattgctcttttggacagaactcataccgctccttgaagccaaagcctggttttatccttttagggtgtgcaataatgtcaaactttttcctctggcctccttgggtggggagagggagtgcttgtaggagctgccatttaagataaaaaaagcaaagctgtacaaaattcctagagttctgtcacctggatctgcagactaagcttttatatttttgtagaattctatagctgtctattccctaatgacgttggagggtatggggagggggttctgggatctttcattctcctagtggttagaagattctgggtcaaggtgaagccagagagctggactcctacccctccccactcttccagcaccccctctccccgctcccgaccaccagcccagcagcactagagtactggagagttgcttaggttgagtcttagcatgcctggttctttgtgcgttcctcttcccctggcctcctcttcccagtagggaccaaggaatttggggtgaacttactatgcttttgggttgctctgtagagatctgcagggaccagcccagtgaaaacaaaaaggttcccctattccctccccagcagccctctctgtggcctggagggtttctctggaagagggcagtgcctggaggggagcctctggatagtgatgtggaaatattaacaacagagtcaaagcgggtattttggggtagtcggggagaaaactgtgacctctccccccaatgatgtaaaatctttatcaatgatggaaactgttgtgtctcattaaaagggttttgaggtggaaaagcagctgccgctggatcttaataataatatcaaactgctaacctcatgctgcttgtctgggtggttatttgatgctgctctgggatacataaggggtgggggtagggggtggagaaaatgaaggaggctgggatggggagtggatggtgggggcagcaggtcttggatgaggactccaggggcagaatggaactggctaggggcttcagggatgtgggggcttttagaattaggaatatctaccctggtgcctttgtcctcagccttccccttcggggttcagaagaaattgtgacagcggctgtaggcccccacctcaagcttggctgtttctgcttcctccacccccaagactccaggaaaaggtctgtgtgggggtggggactgggaagaggagtgagctgagctggggataaaaacaaatctgaggctcatatgcagtctctcactcctcaacacaccctagcaagggaagtctgattgctatttctccatgaggcagcggggttcagagaggttaagtgaattgcccgtggtcacacagccaggagatggcagagctgagatttgaccctacgtctggccaacctccagcccacactactcctgtctcttctcagtgtggaggaaatggggcacgatgggaagaatcctgctcaaaaaatgacttgctggtgggcgcttttccaaagtagtcacattcacgttcatacaaatatgcacacgtgttccccgcatggcaaactcagaggcttagagaggcccccagcctcccacctggtgggccaccagcttttggccatagggaatggtggtgagaggagttcaatcacaggagaaggcatccctcagctccaggcgcttgtccaagagctggccaagggtagctctgcaatcactgtgggttcccaggctccacccttccgcagcataacgctgcccttgaaccccatggtacctgttcttttccccatcccgccttcttctctcttcctctcctctaaccctgccctacctaaacctcacccactttccaaacagctttcactcctatctccaccctagtccccacctgccacagcctggtgccccatggcctattttctcttcccttgggccagctgagcagcccgtggagtggggctggcaacagcagtgcaatgagggcatcagacaccaggtggcggcacagggcaccctcacctggtgccacctggtgcccctcctgcaaagggaccaagccagggagagggcaccaacaccgatggacaccttctagggacaggtgccctgtataacctcagaaggaggaagcaggcctgcagggcccagtgaaggactttgtgtatggagaagcccaaacaggaatccccgccatctgagtgctgagcccacggtgttcaatatcccttggctaaagctaggagactcagggctaatccaggacaatggttgccaggagggaaacgaactctcaaagcaagttgagttgtggcctggagtcccactccagggcacagcaaggcaggtcaaggaggcagctgctccagctaagccccaaaagggaattctgctaagaattttgaaactgtgtgtcttagccttggttccaggtgtgggatctgcgaactgtggcccacagagctaattaattcttcttgctttgaaaactccagaattgggcacagcagccagcactctcccctgcatgccaaatcagatcaagtgcaggttggcggcagaggggcagcctcactgagggccatgagtggggccagtggggccaccattaggctggggtctggaggaagcagaccccacttcaggggagaggacaagggggaggctggggcgtgggagctgcagcctggtttgggggtgctccaagcctccaaggagccgcaaggggctaaaaggaatcaggcagtgcttggaggggaagctttgctattccacaccctgcccctctgtcttgtcagttccaacctgcctctctcccttcggagcatttcctgtgcctgggtctccccattgcccccattctgctttcttctctctgctgtcatgcttgctctgagctgtaccttgcaattattttatctttccatctccttgccaggaaatccttgacgccgggttcccctgggacactcactgcgggggaggcaccgcacatgctccatccatcctgcctggagcagcagtcagttggggagggaggatggggcttgggccatgaaggctgggggaggtttggtccatttctctgctgcagcccaacccacaaggccgttactgcttctccggagcccttccagcaagaaccatcttggttctgaacactcaaaagcaaagtgggcagtgcccactgctgggactgtacttaatgccacagtggccttgttacctatgactccttcttaggaaatgaggtgtttgcttaatcagtcaacaacacttcctgaggaccaacttctccaggcactgtcctgggtgctgaggatacagtgataaacaaacttcagtccctaccctcaaggtgtccacagtcctctgggggaggtaagcaagacatcagtgattacaagtgggggaagcctcctagcccaggactgggttggggaggtccaaggaaggctttgacggggaggggggcttgagcgaactcttgaagaagtttgccacttgcagaaagggaggtagggtgtaggtaggagagtgcaccaagcagccttgaagacagatacaggaagtgcatcccgctcaaggagactgcgcagaaacagtctcctcggcagacgtggggcgcctcctgcgtgtgctgggataagctctgtggcgctgagcaagctgtagggtgtctcagggcctcagatttcttgctctggtgagaacaaccaaaacaataacatcctagaaatattgtggttattattcaagggctctgtgaaaggggacacacttcctgagtggcctggaggggtaaagccccaatacctcaagagagatgggggaaggtgaggatcgctaagggcccccaccacgccctcagagtgcccaacccagtgctatagccttgggaaagcaatagcgatagaaaagcctggggctgcaagggatggtgcttcagctccgatgctgaagccagaacccaagggtcctagcccaaaactagagctccagccagtgcactgcctggccaactgtggggctggaaagtcccggacggaagctcaggctagttctgggctctccatctcagaaaggaggtctgattggggagctcacctcccaaagggccctaaaggaaagtccccaggtctcctcaagcccagagcaatctggtgcctatgaccccacaagccctagaaaaggaatgggagaggagggagagttggaggaagccggtgggtagacaaggtcaaaacacaggggcagtgggtgctgatgaagccatgaccagggtcatggaaggggtggaggaaggttcccagctgcctaggccatagaagcctggcccaccagggctggaagagagcttagatatcaccctgtccacgtttctcaagaaatgaagtcccagaggcatcaaggagcttattgagatcacacagtgtataaaaggtatggagggggattggaggggactgagttagtccctgcccttggggacctctcagattagcagggaagacagactcttcataactaaatataatccaaggcacgccgtaacaaggtgtaaagctctgtaaagtattttgcccagagatgaaggtagggggacaggagagggagggtatgtgtggatgagtggaaaggaagagggcagacaaagaaggggctgaaagaacttgcccagtggaggggtagaagtccctggtctgactgcctgggaaaggggaatcttctccactcccacccctatcccatgcccagccagatcttggttctgatagcctatagccaaggagacttcccttctagtgacctcctggctgcccagagagataggaggtggcttgccccttctgcactcttactggctcccacccacacctgccgctgagcagccaaggaaggaaacaccttctcttgagaacaagggccagaaaaggggtcaccggggtgaaactggacagacctgtgggcaaaggcagggaagagaagggccagggaaagatttgccagggagaattccttctgagccccaacaagcggtgctgagttggcgtctgggattgtgttaaggaagacagggcaacagcgggattgagagatggagggatccccgcatctgaggggataccgggagaaggagagctgaggcaagcaggagaaggagagcactgacaagcccattttacagatcaggaatgtagagtttcagccttaggaggaggacgaggacgaggacactcacgtggggctcctcctggggcttcacctgtccttccccccccaaccctgatcaggctgaagcagagggaattcacacatgttgggtgcccactaagtgtgccaggaaatacgctttgcctaccctttccattcaatcctcagagaaccctgggaggaagattctcttctatgattgtctctattttacggatgtgaaagtagaggcccagagacgtgccgaggtgatgtggcaaggtcagggagccacagagcctaagagggcagcagtttaagaggacataagaggcccccgctggacgatgctgcggcccccacccccgcctcacgggtacacacccgcggagcacaccccgtgtgctccccgtgtggcgcctgccagtggtctctggaacctgatggggaagaggtcagcttcctgattgagcacagaagcccttcccattttacagatgaggaaactgacctccggagaggaacgtgaccttctcaaagattccttttttactaggaaagattgttaaatccctctccctacgtcccctactcaatgactcatcggccccacggacttgttcgggagtgggagcgcctgtgtatcccagttcccccttggaaatagactcgactcctggactgttagcctcggtatttagagagacatccccctggcttggcccaggggccgctcgcaggggctgtcgccgtgccaagggcccccccacctctgccccaaagtccctcccagggaggcgctgtcgcaacccgcgggacgggggcagggagaccggacccagaggcactggggtagggctcggcagggcgggtccgggcggagcgcggggtgcggagggcggaggcggctccggcgcccgctctgcccgccgctgggtccgaccgcgctcgccttccttgcagccgcgcctcggccccatggacgccctgtgcggttccggggagctcggctccaagttctgggtaaggcgcggggctccggggtcactgcgcgggggccagggtcggccggcttcgcccggtccccgccgcctgccttcccgcggggccggcaggtatcccgggacggagcccctgagacggcctgggcgcccgggagggggcgatgggctcgggagggaggttggctgcgccgcccggagccgggtcccacgcggtgtcggggacctgccctgctctgcccttcccggctgcagcactggggagcccgggaaagtgaggaagagtgcgcggctggggcgcaaaggcacagtgcgtggctgggtgagtcggctccatcccagcccctccgtcgggtgcggaaggggcgtttcgcaatcagccgcgggttcctgatggagggtcttccctcagcatctgcctcaggttaggactcggttgcccacctgggcatggattgcccccagggcatccagagcacctgctcaaccaggtgttttgggaggccggctgtgcagtgtcccacccttcttaggaaggtttcctgccaccttcttttctctaggtaagactgaggtctgagagcaggccatccccaccactccggactcagaagggagaagcagaccccagtctggagacaggtgcagggtgtcaggattcctgtagtccaactcccttctcacagatggagaaagggaggcccagagagaggaagggacttgcccaaagttacccagttcaatgaaggcagagctgggatagaaaaacaggctacaggccaggtgcagtggttcacgcctgtaatcccaccctttgggaggcagaggtgggaggatcacttcagcccaggagttttagattactgtgagctatgatcgcaccactgcactgtggcctgggcgaaagagtgagaccctgtctctaaaaaaataaataaataagaaaagaaaatcaagcctttggtgactctcactccaaatctctttctaagacaggctgctcttcagcctgctgactccagcctccagcacagttcaggtgagctaagtgcatacagcctaggagctttcttaccaacttgcaaaacttacttgcctctatgaggcaagtgatcatgtggtctccgttttacagagggagctcagattaaaggtgcttctctgtggtcattaaaggggtgtccagggcttgtgaatcccaatctctaagtcttttcctattttgagtatttgtacatatatgccctttgtgtgtgtacgcacacacgcaggcacgtggggtgttacccaagagttcgtgctgtgcacgtgtgtgcacaggtgtataagtctggagctatgctcttgggctgtgtttagaatgggctgaaggcgttatatggattttttgaaacttggggcaatggaggtaaaaaaaaaaactgtaaaaaggcatatttgggattctctctttttctgtgggtgacccaaaggttaatccgagatggtgcaacttctctgccactgcccttctttcccagtcccacaggaacttcatgtattattcagcatggacaggccacttgccaccagggtccagaggttgtgcctttgcctcatgagcacacttcctttcactgccctttgggccaggctggtatgaccgtggcaggtttgtggtgcctgggatgccaaacagaaaatcaagagggtagttgtgcccaagcttcaggcacaagggctcattgttcctgggtagcctcctgaaccctgagagcttaggactctacagagacaggtctcctggaccccagagttgggaaattcaggactccctttttgtcccatgttcagacatcctctggctctaccttaacatgggattgtggaatccaagaaagtgggagcttgggagtttgaagcagcgagtccaacccctcagtgtagagctggggaaactgaggccaagggagtgaaggtcacaggacaatcaaagacagagtgctgggctgggaaaccggaccccggggctgtggttacagggttgccattgcctggctgtgagcctttgagcctctgggccctctggcccgcgcacttctccttgatgctcgtgagctatacacacctcctctgaggatgcaggctcagtgggagtcagctcatctacattatgaagccctcgtgagatctctgcttggataccttaaatggcaaactgaccaccccccttcccaccccaatctctaaacatctttcacattctcttctggctcctgaaagctgttccaggctgcacccagtgtggctggtgactggggaaggagcgtggagagagaaaggaggctcccagctcatcctctgagggaatgacagggtttgtacagctgaaaggagagagagtctacactggaagctggatcctctgccacagcctaattacaaaaaaggcctggagttctgggctgttcatttgtgatgtgctgtgttgcatctcatttgcatggtgtattattaaggcacaactccccctgaacctttaccttaggggcctgtgggtgacccactttgtgggaagtggttcagggcagcccggaagtacctgaactaggagtgaaaatgcaaggagggggtggggtgttcaggcccctctgggccgctcatttaatctaccaagatgctcagtagctcatccttatagcttcagtttctccaccagtggaatgggaaataacccaacccctacccacctcacaagatttttctgatcaaatgagacagggaatgtggaatgattttaagaactaagaagttttctatgggtggcaagttctgacattccccggaagagggaggagaaagaaaaatggggttagaagaaaatgtcagacgtgggaagacctgcagggaaagagctggtagggctgtcgggccagtggctcccatttcagctgtttgctggggagctgggagctgttcctggctcagtctgagggtaggagactggagaggaccatgccccttgggacatgtgtacacacatctgtgtactcacacaccacctgccaggtgaatgatttgtgtgaatccttctctctctcacccatatcgactttgaagcaggttaccaacttccctgaatgtgccttgggagtttttgtggaaataaattccaaaagagtgaactgtgtaattaaaccacctcactactcaggaggccagaggtgcctcagaacaagggaggaggtgggatcctctgcctgcaggattcctctctgttctgaaccacagaggttgggagcacctgggtggtgaagggagtatgtggaggaagggcctggaggtatttaccccccgccagataaacacctgttggcagaattagccttgatctgacagccccaggaagcttagaaatctgaagatcctgaccatgaaagccatccaaagatggcaaggaccgcctgagaagtagtgagctccctgtcactggggggtatgtaaggacatggttagtgactgcttggcggagatgctggagagaggattcaagccaggaaagaaggtggggtcctgagattctgtgactgggtagagggaagatgcggccagtggggattcattagttcctcctctgagatttctggactcctccttccctggctctctccctgctctacatacggaatttgcctagaagcagctcttggtagaggcctctgggtctccccttggttaggcccacatgggaaaggtgacctcattgttcccttagctgtttacccatcctagggaggggcagatccctggtcccttggaggctcagctccctgtgtctcctgctctgttttagctagccccaattctgctattcaccagctgtgtgactttgggcaaatgactcaccttctctgggctccagcagggctgaggtgggctctggggcctgcttcaggtctggagttgcccaattttggaaggatgagccttgggcttgggggcgaaggctatgcatgattagggcccttcaaagcttagagctcctgggtatcagggtctcctctgccttcttagtaggcagccacaaaaatgtatgagtaatgggcaaggctcctatgccaatgtattttgactcacaaatgaagacagtgtcctgcacatccatggggaagctgagtgggaggtagacactcctccgcttagcagacaccatagctcaccctcccctcaggaacccagtcctccctgcaaggccagagctcccggggctcctttcctccatctcagctgctgcaagcaaacccagtgctggatggctttgacctctgagctcttggcttctggctacggcatttcattgcttgtggcctcaggctggcttctcctcaatcctgctgttcccccacttcacctgggccttaggtccctgagggccagagagatacggggaaggaagtgagtcagggaagtggcattcaggagggagctttgccaagcccgcctgtagtccccagacagggaaatggtcttgaaacactgggcaggcttccagggaggaaggacttggcagggatgaccagctgagccaccccggagtagggccagagcacccggactgtattcagtcctctccattggggcaggatccctggggagttgggggtgaaatgagacctggtatgccattgctggggtggctgggcccctccccttcccgaactgaagttgtttctgtttctggtactgcggtgcagtggttggggctggcagggggcagggtgggatagtgaatgagagcctaactctaggcttggattttggatttctccttttttttttttttgtgacagagtcttgctctgtcgcccaggctgaagtgcagtagcacaatctcaactcactgcaacctccacctcccaggttcaagcaatcctcctgcctcagcctcccaagtagctgggattacaggtgcacaccaccatgcccggctaatttttgtatttttagtagagacggggtttcaccatgatggccaggctggtctcaaattcctgacctcaagtcatctgcccacctcagcctcctaaagtgctgggattacaggcgtgagccaccgcattcagccagatttctcctaactggatattcaggtttctagtcaggggctcccagaaccccagctaggccactacccaggtgttagccgctctgctccctcagctctgtgagaataattgcaaaaagcaggtgatatgagaatgggctgcatggctgaaaggtgatctgggtgcaagtgctctatccccagggtgggacatcatgccggagtcctaccaggtgtacaggaaacactaatcctgtgggaaggagctgggccctggaacaaaactctctgggtctaatcccagcatcagccctgggtgtcagctgtcatgagcgtgaaatgatcatcctggcccacagcaggagctcagtgaaccaaagccccttccagaagcacattggccagttgagcccgtgagccatccctgcaaggggccagcaggcgcagcacaaccagtttttgtttgtttgtttgttgtgttgtgttgtgtttttgagaaggagtctcgctctgccaccctggctggagtgcagtggcgtgatctcagctcactgcaacctccgcctcccaggttcaaacaattatcctgcctcagcctcctgagtagctgggattacaggcatgcgccaccatgcctagataatttttttaaatatttttagtagagacagcgtttcgtcatgttggccaggctggtcgcagactcctgacctcaggggacccaccctcctcggcctcccaaagtgctgggattacagcacagccagtttttgacccctgcccccaggccttccaaaggctgagggagggtgagtggggatcagcacgtgtccttgctctctccacgccttcattgctgctgagtcaatggtcttgtctgttcatcccttccctatctgggacttcaggagctgccctgcagtggtggcttccttctccagtaccacacaggaatagggaagtaatgactcttctcatgacagagactgtcaacaggcctggggcccccagggcttgggaagtccctggcaaagctggggcagagggctccggggtcctcaccccccgcccccatcgcctgtatgagtctgcagtgatttcagcttcagtgaccatgaagtctgccatgagggggcctctgccacgtggtccattctggatgtgggaccttaccccttatcagccccatccagctgtttaatcgcattattaaggaagctgttgttgctgtggaaactgtgtgggtgatggtgggggagggggctgtgggctcagctctcacctcccagcagtgctcttcagagcgggaatgagaggagagccttgagtagggatcgtcatcctgccctgcagggattcagggagtgttacagggtccagggaataaccttcactggccctgtcctcaccttcattttacacataactgagttggagacccttctgggtgccaagaactgtggccttggtaccagggagagaacactgtgttcctgggcatgaagctgcagaggctgcggctggagttggcaccctccatttatctattcatttgtttattcattcttttgttcaatagatggttattgagtaccttctctgtgccaggccctgctctaagcaacaggaaataccatcaactgcagaatacagagctaaagaatctgtcttcgtggagcatatactctagtgggaagaggcagtaaaacaagaatcataaaggccaggtgcagtggctcatgcctgtaatcccagcactttgggaggccgaagcaggaggatcacttgagcccagaagttcgagaccagtctgggccacatagtgggaccccatctctacaaaaaaattaaaaaattagctgggcgtggtggcacatgcctgtagtcccagctactcaggaggctgaggcaggaggatcgcttgagcccaagaggtcaagattacagtggggaaaaaaaaaaaaaaagaacagttgaatgtggcactgtcatgccgttcaacctgtaatttgaaggtagaatggacagggtttgctgagagaccggatgtgggatgtgagagaaagagaagaatcaggggcaactccaaggactctggtctgggaagagagacaggaggaaggaactgccatccccgggccaggcaggctagaaaggcagggacggccaagagctcagttctggacgtgttttgtatgacgtgtcccatagttgatgtcctagctcagggtctggagtgaaccaaatagggagttaggggtgagggcctgtgtgggcgggtaccccctgcctcctagggagggccctgcccaggtgggacatgcttatctcaaggaaaggagcccaggctgaatgcccttgagggtcaaagcagccacccagttctcacagccccaaagtcccctggttgttgccacagagcaggtgtctgcgaaaccaaaacacgggcctgacagctggaggctccatcacccgcttccctgagtgttgtcccgttgccatcgaagtgctttgctgttcattctccctcaccttctccccgctgtggggaggtgaccagatgctgtcatcactcccattactcacaggtggagactgaggttcaagggcacgaaggggctcaccaacagttgcatggctcaaaagtggcagaagccatcctggattctccgcatcggggttgggttcttcctgtggccactccccacccgccttacagagccatgccaccggcctgcaagtgcacacagcgattcccaccatgtccccacgcctgggctcctgtcctcaacatgcacactcccttgtgagtcaatggccccgtgtggcatcacaaagcctgggtgcctgtcccggccacacactgctgggtgtccttgaacctgttgccaaagtgggtgtagtttctcttttgtacactgggcctaacagtgcccctcctatatacccctggaagttgttctgagacaacatccagataacaactaggtaagtgcagtaataaaatgcgggagaaacattaggggcctttattttcctcacttaactggctgccagggaaaagcaaggaaaggtcagaggctggggtgccccagagaggccccatgtagatgaggctctggctgggcccagagaaatgggatgtacactccggcccagagacctgaagatctgggttcagggcagctttgggacaggctatctggatggcaactaactggagtacctgatcaggcctagaggtgtgtcctgtgacccagtgtccaggcctgggccagcatgtcagagactcagcaagagtatgtgggtccttggctcacattgtttgagcaactactgaatactgaataggactactgaatactgaatactgaataggacaagatgtacatggtacaacttctgcccacctgggccttcaatgaaatgcccccaggcagcatgtccctgactgcatgcttcacagagcagggataggcctgcccaacgtgccactgtatctgcagaacccagcccactgcctgactcaccaaggccctcaccaaacattgtcaaggccaagagtgacgctccagggaaggggatctctctaggaggaagggtgctcaagatgaagaaggtgggttttcagccaggcctgtcacccctccctggagtggttaggttaggattttgacaagtggtaaaaagagggactaggttgagcaagggggtaggagcaagaatctcagagcagatttaggatgaagtgagttggctgtgggggaagggagcaatgggaaaggaggtgggaggagatgccatggggggggtcttgaggaccaggttgggtgctaggatgtggcttcatgagcagcaggagtcactgcaggtttgtgggcatgaggcaagaggcacaaagctgtattttgggaagagccatctcgcaggtgggcaggggcactggagggcagagggctgccccagatgggattaagaagggaaggcaggccaggcacagtggctcacgcctgaaatcctggcactttgggaggctgaggcgggcggatcacaaggtcaggagttcgagaccagcctgaccaacacggtgaaaccccgtctctactaaaaatacaaaaattagctgggcgtggtggcgggcatctgtaatcccagctactcaggaggctgaggcaggagaatcatttgaacccgggaggtggaggttgcagtgagccaaggtcacaccactgcactccagcctgggtgacagagccagactccgtctcaaaaaaaaaaaaaaaaaaaaaaggaagaagggaaggcaggctggggaggttggggaaaggaagcagggagtgcagatcactccccttccatgagttgttttcttaagatgctagaacttggccaggcatggtggctcacccctgtaatcccagcactttgggaggctgaggctggcagatcacttgaggtcaggagttccagaccagcctggccaacatggtgaaaccccatctctactaataatacaaaatttagctgggtgtggtggtgtgcacctgtggtcctagctacttgggaggctgagacaggagaatcacttgaaccctggaggcacaggttgcagagagctgagatcgtgccactgcactccagccgaggtgacagagtgagactccgtctcaaaaccaaaacaaaacaaaaaccaaggccgggtgcagtggctcatgcctgtaatcccagcactttgggaggccgaggtgggcagatcacaaggtcaggagatcgagaccatcctcgctaacacggtaaaaccccgtctctactaaaaatacaaaaaattagacgggcatggtggcgggcgcctgtagtctcagccaatcaggaggctgaggcaggagaatggcgtgaacccgggaggcggagcttgcagtgagccgagatcacgccactgcactccagcctgggcgacagagcgagactccgtctcaaaaacaagcaaacaaaaaaacagaaaacaaaaattagcctggcgtagtggcatgtgcctgtaattccagctacccaggaggctgaggtgggagaatcgcttgaaccctggaggcagaggttgcagtgagccaaggtcgcaccactgcactccagcctgggtgacagagcgagacttggccttaaaaaaaaaaaaaaaagaaagaaattaaccagccgtggtggtgcacgcccgtaatcccagctactcagaaggctgaggcacgagaatcacttgaacacgggaggcagaggttgcagtaagccaagattgtgccactgccctccagcctgggcgacagagcaagattccatcaaaaaaaaaaaaaaaaaaaaaaaaaaaagatgggagaactcagaactcaagcatatagattattcaacagttcacatagccagatagttcaaggccagctgtgggctttgaatgccatagtaaaatgtttgaactttgccttctaggcagtagggagctactgaaagtttaaagggatggtatactattattctttcattcatttattcaataaacgtgtatgtgtgtgtgtgtattttttttttaagagtccaggtcttgctctgttgctcaggctagagtggagtggcataatcatggctcactgcagcaacaaactcccgggctcaagagatcctcccgccttagcctccatgtaactgggactacaggtgcctgtcaccagaccaggctaatgttttacatttttgtagagacagcgtcttgctatgttgcccaggctggtctcaaactcctggcctcaagtgatgctcctgccttggcctctcaaagcactgggcaatgtccctggtcttcaataaatatttgatttatttaagcaaatcttttttctgagcacctactatgtgctaggcaccattctaagtacttaggatacatagataaataaaataaaggttcttcccttcaaagagcttacatgtcagcaagtaaaggaaaagatgagagaaaatataataaatcagtaaattatatatcatgtcaaaaggtgataggtgttatagagaaaagaaaaagcggagaagggtgggagaattgggaatacaggggtgggacacaggtggcagtattaaacaggatggtcagggtaggcttcattgagaaagaaagacttcaggatgtctgggggaggagtgttccaggaagagagaagagcaagtgcaaaggccctgagacaggagcagcaagtgcatttagaaacagcaaggaggccagtggctggagtgaagcaggaaaggcggggagagggtcatgggttgggggaagggacattgtgcaggtctatgcaggctattgtagggtgtatggagtgaagatgtcaagtcagcagttagatatggagctggagatttggggagcaatgagctggagagatagacttgaaagtcattggcatatagatggtacatcatatcatcatatgagactgcatgggattgccaagaggttgagtgcagataggaaggaggcagagaagaggaaaggactgagctccaggaccctcttgcaccaggcaggggaatcagcaaagagactgtgatggcatggccagaaaggaaggggaaaaccatgcaggatctgggaccccagggaatctgaagggaagagaccagaagtctatggcaattgctcatgaagagatgagggtctggccaaggggccaggtgggaggaaccaggtaagagatattatcatcccaatgttacccttaaagaaaccaaggcccagagaggggagaggttaagaacctgggtcaagatcacacagcttaagtgtgacttcttctttttattttttatttttttgagacggagtctccctctgtcaccaggctggagtgcagtggcacaatctcagctcactgcaacctccgcctcccgggttcaaacagttcacctgcctcagcctcccgagtagctgggattacaggtgcctgccaccacgcccagctaatttttgtatttttagtagagacgggatttcaccatgttggtcaggctggtctcgaactcctgacctcgtgatcttcccacctcagcctcccaaagagctgggattacaggtgtaagccattgtgcccggccaagtgtgagttcttttaagctgtgtgaccttggccaaggtgcttaacctttccctgccaagtctcaaacacctctttgtccagctactatgcttccatcaagaatcaataggacctatgtccctacaggtgtcagggtagctggcagaatggtgatgcccttggcagaggcaggcaaggccaaaggaagggctggttctggcagggagtgaaggatcttactttgagaggtattgaatatgaggtggctgcagacagatggtgacgccatctgagaggcagcaggaagtaggcgctgaggctcaggaggtgatttgagctgttgatctggatttgggactcctcaggacaatctgtgaacaatgatgagagagagcaccaaggaccaaggtctgaacttgggagctagggcccatgtccacagggtgaactggaaggaagataaggagacagcaaggaatgcttgccaagaaaccaggagaccaggaaagagtagtttccaagagatgggggaagcccacactgttgcagggaggtcctgcataaagtctgaaacgggtctatttaattcgcccttggaggctgggcatggtgtctcacacctgtaatcccagcactttgggaggccaaggcgggtggatgacctgaggtcaagagtttgagaaccagcctggtcaacatggcaaaaccccgtctgtactaaaaatacaaaaattggccgggcgtggtggtggaagcctgtaatcccagctactcgggaggctgaggcaggagaatcacctgaatcccagaggcggaggttgctgtgagctgagatcacaccactgcacaccagcctgggagacagagcaagactctgcccaaaagaaaaaaaaaaattgtagttggaaggacttctggttctatagggtggattgaacacaagactttatctccagtccttcctgattttccatcaaagtgacagtaaggaataaagaatgtaaacctacaaggacaaagagaagaggagacaacagcagacaagatattaacacctttttggaaagtgagaaacaggttgaggagtgatcactgacacagcagagaacaactgaaaccaaaggccatttggagtctgtaaaagctcggggattggagggctgaaggaggcaaggggaagagcagggctgaaagcagcggctgctaggagaatgcataaggagagatgaaacacccaagatacttatccatctcctctcaaagccaggcaaattccagccacctcacagaagaccagcagtttattctgtggaattaagtaaaagtctgcatactgaaggatagaaccctcagccctcactcctaaattggtcccagagaaaagacctccagattcttccagttgttgggggagtcttccctaaaggaccaggttcctacttgatcactctgcagtgaagcccaacagccaataagcttggtcctcggtactctgtcttcagtagctgtttcttggtccttggtccttggtactctcactcatcattgttcacagattgccctgaggagtcccagatccagtcccaaatccacctgcccccaacacacagagcagccaactctttagtgtcttactccaaaatattgagacagccaagccgcaagaatcaccacaggtcgggtgcagtgactcacgcctgtaatcccagcactttgggaggccgaggcaggcggatcacttgaagtcaggagttcgagaccagcctggccaacatggcaaaacccctctactaaaaatacaaaaattagctgggcattgtgacacgtgcctgtaatcccagctactcgggaggctgaggcaggagaatttcttgaacctcagaggcagaggttgcagtgagctgagatcgtactaccacactccagcctgggcgacagagggagactccatctcaaaaaaaaaaaaaaaaagtcaccacacatttgaggaaaaattctgttaaaataaaaactttagacaaattaaatttagcagagtttatctgagcaaagaacaattcatgaatcagccagcatcctgaaccagtagaggttcacagagttttaccacccagcagtatgggcaggcagtattaatggacagagaaaggaattgatgtatagaaacagcttgattggcgacagatcagtatttgccttatttgggcatggtgcaatgaggtgtttgccttatgtggacatgttctgatgatctggcagcttgtgattggctgaaaattctgctatatttggctgagacttggctgcttattgtaagaatatactctcaagttacgttgcagtttgtttacatattgaattatgctacagtccactatgtatggagtcagctttatacctgggtgacagagtgagactttgtcaaaaaaagaaggagaggagaggagagagaggagagagatgaggggtggggaggggaagggaggaaaggagaaaggaaggaaggaaagaaggaagggagggagggaagggaaggagggagggaagaagggaaagaaagaaggaaggaaggaaggaagaaagagagagagagaaaggaaggaaggaaggaaataggcaacacataaaataaatttttttaataggatcacaggtcactgtgaacaatagccgttcattaaatgacttcggaggcatatacaaaaagttacatagttgtagaaaaagcttagctgttttaatagcgagttctcagttttcttaagtgatcaaaaacctaacaaagacagcatgaagcacaggaaattatctgggtagaacacagaatctttgttttctaggccaactacctaaagagaaagaaaaacattttacaatttcctattatgatcagaccaataatctaagaacaccatgttgttttaatggagagaaccaaattctagttttgcatcagtgtaattttgatattaatgctagctcttatcgcccaggctggagtgcaatggtgcaatctctgcttactgcaacctccgcctcccgggttcaagtgattctcctgcctcagcctctcaagtagctgggattacaggcgcctgccaccacacccggcttattttttgtatttttagtagagatggggtttcaccatgttggccaggctgggctcgaactcctgacctcaagtgatccacccgcctctgcctcccaaagtcctgggattacaggcgtgagccactgcacccggtcgctaacttttattcttaaaaaacttgtaaataattacctcctaatcttaaccagcttgatcacccataaaatttctttcacaagattcatcttccacaaacctcctacaactcttatatccattcactttttgtcctatactttcctcttctcattttcgaaaaatcagtcatttcactttaggacaaaatttattctctttttccgttatcaaaacaaaacatcctcacgtcttatagcttttccttagcttcctttgtatatttctttttcatatattcctttttcttaccttccttgtatattttcatatagattttcccccttattgtttctagtaattgtagctacatatattaattagaattcttaaccccggccaggtacagtggctcatgcctgtaatcccagcactttggagtccgaggtaggcagatcacttgagggcagaagttcaagaccggcctggctgacatgctgaaaccctgtctctattaaaaatacaaaaattggctgggcgtggtggcgggcacctgtaatcccagctactggggaggctcaggcaggagaattacctgaacccaggaggtggaggttgcagtgagtcaagattgagccactgcactccagcctgggtgacagcgcgagactccatctcagaaaaaaaaaaaaaaaaaaagaattcttaacccttagtgaccttaatttccatggacattagaaagtaagcatttgtgaattgtgtgtcacaccagctgtagattggtaaatctatgaaccataatgtctagaagcatgagctttctcatagtacaatttgtcagtgtggcacagaacatgtttctcaatggtccaaaatgtctttaagtctctctgtaaaaataaactgtaaaggaggcaaaatttcatttgtatccctttaggttttttgtttgtttgttttgtgaggcctgaaaactaaattgttgtttgtacagatttccctcctcctcaactttctattcttgatgctaagagtgttaaaaccttctggtggctgagcgtggtggctcacgcctgtaatcctagcactttgggaggctgaggcaggtggaacacttgacctcaggatttcgagaccagcctgggcaacatggtgaaaccccatctctacaaaaaatacaaaaattagctggatgtggtagcttgtgtctgtagtcccagatactttggcggggctgaggcgggaggattgcttgagcccaggaggcagaggttgcagtgagccgagatcttgccacttgcactccagagtaggcgatagagaccctatttcaaaaaagtaataataaaaccttctggtataggaaggacatcttttacatgggaattttatcttacattcatttaactcacttattttcaacacttatgcttggattgcctataaagatgagataataaacaactagtcatcattttgtttttcttgctgacaaattttataatataaagacaacataagcttgttttaccagtaaacctagataggaaatcatgcatctttatgatatttaatccccaaaactatgaaaacatgtctgtttcagtcaaaccaacaatattcttatttgccaaagattacccaagtcagatgagctgcaaaagtatttgaggtagttcttaattttctgagagaatacttcatttatacaagcacttatttttcttaaagccaacaaaatagagctctttcataatttaattttggagcattaaaaggagataagaaactatgatacctgtatcatacatacagacttatataaacataaacagcaacagatcttacagctttcatttaaatatcttagccatgttccaggtacagtaatataaaactcctgaatttattaaagactatctggatccaaattgttcttctggccaatggaacaagatttcttgcccagatgactaaagcttttgaataagattcgtgaaggagcttttaagatttttttgtttgatttctgtaaggaacctattataaagaggcaattttttattcatttaatcttttagatgcctctgtgtatcaattaaagaatgcatcccattgcttttgtggcatttttgaacctttcttttctaatgcaccttgcaagtgaacagttttatctaggtcaaaactttcccactgtggccactgtaactcttaagttgtcctcagcaaagttaacccatttttccaaaaatacacatgttcctcataattgttgttcatgaagttagccaccgtcccagaaagtggcgtctcagactctggagtcccagactccttagatttggaggaactcactttcaaaaggcacctgcctgaggcttttaactggatccatttcagttaattatcagatctgatttgctcctggacccagtcctacttgacccagtctaagaattgttcaaataaacttggagaacacaaaacacaaattcctgaagcttggaatctgagatagaactcacccatgacctccagttgctacaagagaacaattggcacagtgtgccctgtcaggtacccttacttggtcactaaatgctcctgagggtcactggagttctacttccgatcccacttctgacaccaatctgttaaaagaaaagctttaggccgggcacggtggctcacgcctgttatcccagcactttgggaggccgaggtgggtggatcacctgaggtcaggagttcaagaccagcctggcctacatggtgaaaccccatctctactaaaaatacaaaaattagtcaggcatggtggtgggcgcctgtagtccaagctactcaggaggctaaggcaggagaattgcttgaagctgggaggtggtggttgcagtgaaccgagatcacgccattacactccagcgtgggggccaagagcgagactgtctcaaaaaaaaaaaaaaaaaaagaaaaagaaaaagaaaaaggaaaagctttagacaaatttagcagagcttatttgaaaaaataagcaattcatgaattcagcagcatgctaaactagtaaagactcggctgggcgtggtggctcacacctgtaatcccagcactttgggaggctgaggcaggcagatcacctgaggtcaggagttcaagaccaccctggctaatatgatgaaaccccatttctactaaaaatacaaaaaaattagctgggcgtggaggcacacacctgtaatcccagctactcaggaggctgaggcaggagaatggcttgaacctgggaggcagaggttgcagtgagccaagatcacaccattgcactccagcctgggcaacaagagtgaaacgccatctcaaaagaaaaaaaaaaaaaacctaaaccagtaaaggctcaaagaactccacctaaccatgtggtcaagtagtacttacagagagaaaaaaagtgacacatagaaatagcctatttagaactcggcatttgctttatctggacaggtctaagcactttgcagtctgcgattggctgaaagctcagttgcaatgattggctgagactcagctacttgttacaagaaactctcatgttaggtttgtttacatattaagttgggtttcagttcactatgtaaggaggcagcttaaggccaaatttaatctaatttaacacctccagcttgaaagacaaaaccaaaccaaatcaaccaagaaacagaaaaaagaaaattcaaagatgtatgagcatgcataactttgataaaaataaaaataataattatttgaattggcaattagaaaatagttatatcctcaggtaacagatgtctctaggtggatgagattgtgggtggtttttcttgttgttgatattttctgtgcatctctaaaaaacatctaatgctttgcaaagaacataagaaacagattagtacattagtggccttggaggaaacaatctcagtaaaacatgtgtttattaatgaatgtattcccccatccctttccaaaaaagttcataggtgtagttatagtcaaaggtaagaggcagtcttgtcagagccagtaaagtaaccaaccatcctggtttgcccaagaccaagcagcttcccaagacactagactttcagtgctaaaaccagagaagtcccatccatactaggagagttgatcactctagtctgtgtaatttgcaaagactctccatatcctttggttcctgtgagtctcaaatccacccagtgaggtacaggtgggccggtggatggtcacctccatttcagaagagaggcagctaaggctcagggaatctccctatccctgacccgggaaaggccttaagagaaagtggtcttttaaactgtgtgtatatatcactttgataaaattaaaaattagttttaaagaagagagagggccaggcgcagtggctcacgcctgtaatcccagcactttcggaggccgaggcgggcaggtcgtaaggtcaagagatcgagaccatcctggctaacacaggtgaaactccatctctattaaaaatacaaaaaaaaaaaaattagccgggcgtagtggtgggcacctgtagtcccagctactccagaggctgaggcaggagaatggcgtgaacctgggaggcggagttttcagtgagccgagattgcgccactgcactccagcctgggcgacagagtgagactccatctcaaaaaaaaaaaaaaaaaaaagagtgagggccaggcgcagccgtcacgcctgtaatcccagcactttcggaggccgatgcgggcagatcacgaggtcaagagatcgagaccatcctggccaacatggtgaaaccccgtctctactaaaaatacaaaaattagccaggcgtggtggtgggcgcctgtagtcccagctactcaggaggctgaggcaggagaatcgcttgaacccgggaggcagaggttgcagtgagccaagatggcaacactgcactccagcctggcaacagagtgagactctgtctcaaaaaaaaaaaaaaaaacaaaaacaaaaaaaaaagagtgggaatccagaatgatagaaagaaaatgagcctgggagggatgaactgcagaggaccataaggtaacatgggagcagttttgcaggtgtatacaactgtcaaaactcactgattgtacactttaattgggtgcagtttttgttgcccttaaattatgcctcaattagagagaaagagagagaatataaggaaatgggggcagccatggcgtccttggagaattcacacttgggacgacaactgctcatttgtgtactctctcctcctcacctgtcttccactccacccctgtctctgatggaacatctctccagctaagccatcttcctcaaggcagcccaattctctgtggggctgccacagcactaaactgttctctgtgtccccaggactccaacctgtctgtgcacacagaaaacccggacctcactccctgcttccagaactccctgctggcctgggtgccctgcatctacctgtgggtcgccctgccctgctacttgctctacctgcggcaccattgtcgtggctacatcatcctctcccacctgtccaagctcaagatggtcagtggctcagggatctcctaccgatggggctgggccctggggattctgcttttattttttaatttaattaaattaattaattaattaatttagagacagagtctcactctgtcgcccaggctggagtgcagtggcatgatcttggctcactgcaacctctgccttctgggttcaagcgattctcctgcctcagcctcctgagtagctgggattacaggcatgcgccaccacacccagctaatttttgtatttttagtagagatggggttttgccattttggcaggctggtctccaactcctgacctcaggtgatcagcctcccaaagtgctgggattagaggcatgagccactgtgcccagccagcattctggttttaatgaggccctctcccacctcctcggctggactgggttccccagtctcacctgacctgcttggggtcatgggaatctgacaactgagaatatatacagccagctgacatattccccacttgggaaagtttaagtaagttcagcaacactctccccacctccagcaagcttctggtcagctccattcccagacctcagtgccagtcccaggcaggtctagtggattctggtggcttcaggtacaaagaccccttcccagtgaggactgtccttgcctctggggatgcggattccaacctgtgctctcttcgcaggtcctgggtgtcctgctgtggtgcgtctcctgggcggaccttttttactccttccatggcctggtccatggccgggcccctgcccctgttttctttgtcacccccttggtggtgggggtcaccatggtcagtgtggggccctgggaaagtggatgggggaggtctccattgggttgtggactgtgatagggaaactgtgggctctgaggagagggctggacatattgggaatgggaagaagaagggggtggccccagaaacttctggccatgtgggatggggagaaatggaggcaggtccagatgtgtgtgttctgcccgggcctccctgccctccctgcacagctgctggccaccctgctgatacagtatgagcggctgcagggcgtacagtcttcgggggtcctcattatcttctggttcctgtgtgtggtctgcgccatcgtcccattccgctccaagatccttttagccaaggcagaggtaaggttgggggagaggggaacctgccaggtttagccctgataggagggtgacctcagggttcaaagtcactgctgggtcccaggtccctccctcgaggcttcaagtacaaacacaattgtgttgttctccacttgctacatttctacctggaagcaggctgaggagggggcaccagtgtaacacaggaatgagccaagatgccaccactgttggaccatcatgtgagggtagggggctgttccacagcacccacccaccaagtgcaatatctgacgtgggtgtcagtcagtgcctgtgtaatgaacacatgtatgcagacaagtgtgaagagttctggcttacctagaggtcccattagcatgttcccttcctttcttcccacctccctcagttcctggccttcctcttgatcttcagtggctgtgatgttgggctggtgggatggaacactgcaggccaacctagtgcctcccatttctccatctcagcgggaagcaggcaaggagagtagcaaagaacataggctgtgaacaacccacttactccccatgtgggctcgggcgggtcgctgaaacctttggagcctcatttccttaattgcagaaagggcgtcatgagctgtcctgcctgtaggctgatgtcccagttagacaaggtcatgtaggtaaggtgatggcaccacacctggcacaggtgccacacctggtcctcgctgaaccagagctcccttgtgatccttcctcatctctcagagtcctctgagtggggacctggaggcccccaggtgctgcctcctgccccagaggagactgatgccccaagggactccgcagggcaggggctgcaggcccaggcttttccagtgcttctgacgcccctccactctcccacccagggtgagatctcagaccccttccgcttcaccaccttctacatccactttgccctggtactctctgccctcatcttggcctgcttcagggagaaacctccatttttctccgcaaagaatgtcgaccctgtgagtttcccatggagggtgcgggggctccacagctgagtcctcagcccaactctgaccagcagcccccaacccctccagttcctttcaaagtgggagagaggtcatccccacaatctgtaaactggggcttggagcaggaacaagggtcccctccatttccctactctgctttgagagggtggtgggcactcctgattcccccgtcctattctctcgccttctagaacccctaccctgagaccagcgctggctttctctcccgcctgtttttctggtggttcacaaagtgagttggctcttccaccagccaggccagagggaggggagggatggaaggtgagatggagaaaggggagcagggcagcagtttagggaccgggctggccacctatcccaccccccaccgcagtgggcacagggcagatgagggtagggaagtggtctgggagggggaccaaatgcagaggcctggcctggcccagtgccgcccccaggctacaggccagccctgcatctggcaggctgtggggacaggcccaggaggctggaagaagactgtcattagttctgagctcctctgtttgtgataaacttgcagcctgtcatctccttggctgcgcctcagagcggcttgagcaggataactgtgtctgtgacctgggtgacagctcattaaccccacagcactgaggaagcacccgaggctggggccaaattgcccaggcctcgtcctcacccagggccccaggcagcgtggattccatcaccagggcctggggtggggaggagatgggacacctggggaggaggaggagaagggggtagtggtaggaacttcggagggagagccagtgacctcaagcctattcactgaggaaatgaaggagacacctttcatggtcacagtgcccgagggagaccctcctttctggagaccctggggccctggagacactgacccttggctccaggctgctaaaccctgaccctctgcggggctgcctgccgggcttcacctccccccaggatggccatctatggctaccggcatcccctggaggagaaggacctctggtccctaaaggaagaggacagatcccagatggtggtgcagcagctgctggaggcatggaggaagcaggaaaagcagacggcacggtgaggccctccccttgccccaacacccagccccttcgcttaccccagatctcctgcagaggacgctggtagaccttggagggcggcattgctggggtggcaagcagagcaggaccaggtgatttcttggcagcctcgggaccattctatgggaagcttaggcctggatggcgctagttctcccagctctggtgggggcaggagaatggctggcactttggagcaactactccatcccaggtcccatcctaaggatataaataaactcacttaatttttcaacagccctaaagggtaggttcaagtgtccctgtgttacagatggggacactggggccgggtgtggtggctcacagctgtaatcctaacactttgagatgccaaggcaggaggattgcttgagtccaagagttcaagaccagcctgggcaatatagtgagaccttgtctctacaaaaaataaacaagatgagccgggcatggtggtgtgcacctgtagtcccagctacttgagaggctgaggtgggaggatcatttgagcccaagaggtcaaggctatagtgagctgagattgtgccactgtactccagtctgggcaatagagtgagaccttttctcaacaacaacaaaaacagatggagacaccgaagcacagaaatttaacagagggcctcccagggtccccaagttggtggtggcagagctggaatccacatggagccggctggccccagaggttctcctcatatcactgcaccaccctgcctgactgagagggctgattccagggccaggagccagcacacccctgccaattctgcctcctcctgtctggaggcggcggctgaatgagatgatcttcccctgaggggtcttcccactgtcagcctcttatcaaggaccacaaacctgtctctggccaactgcctcaccaagagagctgacgctgagcatcatctttctccacccaattctgaccccaggattgaaccctccctcctcccatccacaatccaggcctaggagttcaatgtttgctcagcccggagcttccggttgtcaccagctgttggaggagcctggggctgggcatggttagcagtatcctggctttcatggcttggagcctccacgaagacctatgggcccccagtctgcctgctgcaccccctctcagtccctccatgccactccaccccctccctgttcagctgcccggtggctgtaccaacagccatccttgatcttatctaccttccctcttggcgtcctccctggagccagcactggggaggcggggagagggccagactggggggatagctgggttttagagtccttgtggtagcagtctggccaccccttcagatgccctctggcagctgaggacagagtcgcttgtgcaattcttatgctgtctgttcccctcccagctctgagagccaagaaaacagctccttcctcctcctcactcctagccagcccagcctagcccttggcttcctggagcccctgtccccattcctaacccactgctccttcctccctggaccagacacaaggcttcagcagcacctgggaaaaatgcctccggcgaggacgaggtgctgctgggtgcccggcccaggccccggaagccctccttcctgaaggccctgctggccaccttcggctccagcttcctcatcagtgcctgcttcaagcttatccaggacctgctctccttcatcaatccacagctgctcaggtctctccacactccggctcactatagccctgccctgggcagcagggctggctggctagcccagaggaaggaacaacgtacagtgaaaagaaccccagaccaggaaccagggaggctagctccactttctgtgtgacctttggcaagtggcattgcctgacttgtttcctcactcacattcaacttagaattgctgtgcatatactatgtgccgggcaccgtggtgtgtacgttaacaagcattgggtctttaaatcttcccaacaatcctatgcggaattgccccattcccatgtcacagatgagaaagcaggaactcagagaggtgaagtgacttggccaagggcacacagcaaagaaggaatcaggtctgagtccaggactctgagctccgactgaggtgctctgtccccaccatcaggctctaacatctgtctcaggaatggcttggactagaacgagctctcaaatgagagggtgggaaggagagctgcctagtagctaagtccccacctccttgcccctccgtgcatgcattaatttgttcagcaaacatttattgaacctccagggtaccagaatggtgctcgatactagggatacagagttcaataagacagggtcttgatgtcttatgggagaaaccagcgtgtaaatcaattagaattcagtgggggcagaagtgttctcgggtgtctggaaaaccccgggaggggcaaagaagccagcctgggatgcagcaggaagcacccactggcttgggaggtcaacgaatttggagagacaagtaggtgaagaaacaggggaaagttcagcctcagcttagtcacaaagccctgaaacagcatgactcaggtgtttctgagtggcagaggaaatggcaacgagagggaggggcaggaaaacagagagagggagagctaaggatatccttgaaagatctgagccagggaggggcatctggcttcaaggatctcctgccaggagtgtgggggatgtagggcagggtggctggatggaagtgggccaacccggtcagatggagtccaggccaggaatgagacaagtattcaggagcaatttgggagatgggcgtgtgcgccagagagacagaggagtgccaggcaacctgggtgctggcctgggtaactggaggacgatggatcttttgctgagctgatgggctcggtgggaggaggaggctgggtggggggcaaggtggtggatggagtctggtcatgtggggccagtggtgctggtgggtcctccaaggggagattcccagctagctggaagtcaaactctcgagcccaagagtttgagaccagcctgagcaacatagcaagaccctgtctctacaaaaaagttaagatattagccaggcctggtggcatacgcctagagtcctagctactcaagaggctgaggtgggaagactgcctgagcctgagaggttgaggctgccgtgagctgtgatggcaccaccgcactccagtctaggtgacagagagagaccctgtctcaaaaaaaaaaaaaaaaaaaaagagagagagagacaccagtcactgggctggggccactggggcccaccctactccaatatgacctcaccaaatgaggccacgttcacaggtaccaggtgttgggagctgaacatatctttctgggagacacaacttaagctatcacagaaggggaggcctggctatgattatggctggagggctccatgtagtcgagaggagagtgtcccaacaatgaagagactcggtcatgtcaataggtgaaggtgtagagcttccagcagaggtggccagggtgaagctcagcggcaaagggggcaacagcgcagcaagttcctgaggaggcagaggaaggccagggctcgggggcaggggcagcctccgacagcctgagcaccagaaaaaggaggacaagccactggagggcagtttgtgagtggcaaggagtttgtgggtggcagggagttctcaatgggtggctaagcaagaaggcaggtagctgctgagaggggtggggggctgggatgggcctgaagggaagagaagagaggtgaagaaggccccaagagcgggggcggattagggacctagagaaggttgctaggcagtgctgggggccactgagtttggaaaggtggatttgagcggcaagagtctttgtggtcatgtggcggaatctagagcccccagcagcctaggagaaggagcagggaagtccagtcaatggaaacgtggcatttcttcccgccatatgtcaggaggtaagaaggcaggcaggtgaggctggtggtgagagcgtcatcgatagggcgtgcagcagggtccatggtggatagagaacgaggtgaaggcagagtggagccaggaggtcgtggtcttgaggcagtactgggttgaccctccctggcccaagaggttggagggggtggaggtttcagaggccaggggtgcagtggagactgcgggtaaaagcaaagggcagcagaggagggagcagccatgggggcagcactgcccacctcactcctctctcctccccacagcatcctgatcaggtttatctccaaccccatggccccctcctggtggggcttcctggtggctgggctgatgttcctgtgctccatgatgcagtcgctgatcttacaacactattaccactacatctttgtgactggggtgaagtttcgtactgggatcatgggtgtcatctacaggaaggtcagctggagcagggcccaggggaaaggctggccctgggcagcttgcaagaggctcgcagccaagtccacccactactgtctacctgcaggctctggttatcaccaactcagtcaaacgtgcgtccactgtgggggaaattgtcaacctcatgtcagtggatgcccagcgcttcatggaccttgcccccttcctcaatctgctgtggtcagcacccctgcagatcatcctggcgatctacttcctctggcaggtgactctccaaccctgacctctgcctccttcctctgacatgctgcagaagtggcaagagaggattattctggaactgggagcatggcacatgcttgtagtcccagctgctcaggcggctgaggcaagaggatcacttgagcccaagagttctggctgcagtgcgccacgattgtgcctgcgaatagccaccacactccagcctgggcaacatagcaagaccttgtctctaaaaagaaacaaagaaaacagaaaaaaagaaggagggttattctgggttagcagaggggatatagaattgacacaagagctggctgggcacggtggctcacgcctgtaatcccagcattttgggagaccaaggcgggtggatcacgaggtcaggagttcgagaccagcccggccaggatggtgaaaccccatctctactaaaaatacaaaaattagccagacgtggtggcgggtgcctgtagtcacagctactcaggaggctgaggcaggagaatcgcttgaacccaggaggcagaggttgcagtgagccgagatcataccactgcactctagcctgggtgacagagcaagactctgtctcaaaaaaaaaaaaaaaaaaaaaaaaagaattgacacaagagcttccctaggcattggtggggatggagggataggacttcgaggatgctgatgtctgcaaaggaatcttcccaacatctgttgctatccttcctgcagaagccagggaggaaagaaagtcttggagggaggtgggtgtgactctggctgtcatcgtctatatttgccttcctgtgtgtctggacacccttctatatctgctgtctgtccctgtcgtcgttatctaatggctggctgcttctacaaatgttgtggtcattctgactttctatctgtttggccaaccaccatcttttgcttcctgcccatctacacatttcaagttaacaggcctctgtttgcctgttgggttctctctgtagactttggtaatctgtccctatgtgtcatctatccaccggtgcctcctcagaacctaggtccctctgtcctggctggagtcgctttcatggtcttgctgattccactcaacggagctgtggccgtgaagatgcgcgccttccaggtaggtgctgtcagaggtgcatcctcctgcctgcagcacccggccggctgcctgggggaaggtgtccactaaccttggggcctcccaactaccttgcttcctgagtatggatggctactagccatttgcagaaaccatagctcactcttccctcacagctctcagagggttttactgacattctcattttgtagcagaagaccaacgcttagagaaataatggcagtccagaatcaggcagggctgggactcaaacctgactatcctggtctaacaaggagttttcccgctgcactgtgctaagcatgaatagccagtcactcagtctactatttgcaaacatttcttgaagtgttttttttctttttttttttttttgagacagggtctcgttctgtcacccatgctggaatgcagtggcatgatctcggctcactgcaacctctgcctcccgggttcaagcgatcttcctgcctcagcctccctagtagctgggactacaggcacatgccaccacacccggcttatttttgtatttttttttttagtagagatggggtttcaccatgttggccaggctggtctcaaactcctgacctcaggtgatccgttcatcttagcctcccaaagtgctgggattacaggtgtgagccatcacacctggcctattgaagtctactagcttcccactgcccataggaaaaatgacaaaccccctaagaagactcagcaggcttctgcttaccttgcaagtcctcaccccctgcggactggccaagtttcagccagtctggtcttctttcttttctccacagcaccaagctcagggtacctctaggggccaccacatatactattccctctgcctggaatgcttgtcatccccctcttgcctgcctaactcctttccttcccttacctctcggcattgaagtcacttcctcggctgggcacggtggctcatgcctgtaatcccagagctttgggaggccgaggcaggtggatcacctgaggttgggagatcgagaccagccagaccaacatggagaaaccccgtctctactaaaaatacaaaattagccgggcatggtggcacatgcctgtaatcccagctactctggagtctgaggcaggagaatcccttgaatccaggaggcagaggttgcggtgagccaagatcgcgccattgcactcccacctgggcaacaagagcgaaactccgtctcaaaaaaaaaagtcacttcctccagaagtccaccctgactgcccagtctcagtctaagttagtttccctgccatcacctcattactttcttacaggatcctgtgatttcccatcagaacacacataatgattaataattaagcatttattcagatcattgtttgcttattgtatgcctcccccatcagatcgtcagctgtatcatggcaggggccttgtctgaattcatcgtgacaaattctacacgtagcccatggcctggcacatagtaggcactccataaataggggttgaatgaatacattaatctggtgtgccacaccttgggctaaggtcttggagaacaaagagaaataaatagtccatcccctcaggaagctcacagtctgattagagaaacatatatgtaaaggaatggttatggaacaaaaggaaagtgcaatgtgctttagaaacccagggaaggggaccaggtgtggtggctcacacctgtaatcccagcacttggggaggccaaggtgggaggatcacatgaggccaggagtttgaaatcagcctgggcaacagagtgagacctcgtccctacaaaaaaatttaaaaattagctgggcatggttgttcatgcctgtagttccagctagtcaggaggctgagacaggaggatcaaaggagcccaggagtttgaggctgcagtgagctatgattgtaccactgcagtccagcctgggcaacacagtgaggcaccatctctaaaataaataatactagcaataataataagaagaagaaaaagaagtagtaggagaagaaacccagggcaggggacagaggatgctgcctggggaggccggtgcagtggcactgagggtggagatggatcttgtcaggcagaggacacagggaggcaggggctgtgcattccaggccaaggcacagcacaggcccagcaaggagttgtgagaaggaatggtgggcagcgtggaatggctgcaatggatgagaatggatggaaggtaggaccctgtgagcaggaggtcaggggagggagcaggtgtgccactgacactctttctgcctgcacaggtaaagcaaatgaaattgaaggactcgcgcatcaagctgatgagtgagatcctgaacggcatcaaggtgctgaagctgtacgcctgggagcccagcttcctgaagcaggtggagggcatcaggcagggtgagctccagctgctgcgcacggcggcctacctccacaccacaaccaccttcacctggatgtgcagccccttcctggtgaggcttggcacagggctgggtccctgcctccagggctctgggtgcccaggcatggccagggctcattggactctaccctgacaccacctccacgctgctcaggtgaccctgatcaccctctgggtgtacgtgtacgtggacccaaacaatgtgctggacgccgagaaggcctttgtgtctgtgtccttgtttaatatcttaagacttcccctcaacatgctgccccagttaatcagcaacctgactcaggtaaccctgggtagggctgggggctctactggagttggaacaggttgttggggtcagggaagggtcacttagggcaagggataatcagggggagttattggattcagggaaggttgctagcattatgaagagctattcaaggttgaatgaggtcattaaggtcaggggtcatttggagtcacaggtggtcaggtcgggtgtctggaaacctgagttctgtagatagcctcctcttaccaacctggactttctctttgggcagtgggagccatggaagactcagtcgtgggagggaccccagtgctagtgtctgggccctcagggggtcctgcctagcccaggatgctggggatggggcgagggtaggggttgggggttgggaaagtacagtctctagggctgactcacatcctcccgtaggccagtgtgtctctgaaacggatccagcaattcctgagccaagaggaacttgacccccagagtgtggaaagaaagaccatctccccaggtctagagagcccctacctgggctgcctgccccagtccttgctccagaaaaacctctgtttcaagct

SEQ ID NO: 14 - DNA, 35098 bp, Homo sapiens
gatcaaggatgttttaattcctaatttagactgtttatgtgcagggctcaagtcccggtgggaagagacagtgtgggctgagcccccctcccccgctcgcctctccagggcggcctcccggcttacagcgagctcccagcagctggggggtgcagggtctgcctgcaggtgtgccaggggaggggcctgacctctgcaccctgaccccagcccacccgggtgtgtcccaactgcagggttaccgaggctcagcccaccctgttcccactcagtgcagagccttctttgtgaggggcgggcccctccccacgccttcgggcctttccctgggttggggagctgaggtcgcaccatggctatggggcagcagggctccctgggacggagccagcgggacagggcccgaggaatccggggtaacactgggcagaagcagctgtcagcatggtttcccgtaaaagagactgggagagagacagaggcaggggaggggagcgggtggacgggaggagatggaccgtgaacagtgaaagacgtacccccacaccggcctgcggacccccacaagcccagtggccgtcagccttgggattttggggttttccaactttaatcagggaatgtctgtctcccctgcatgagtgatctgtggagcctggtcggcatcctgattgtcatgccgaccgagtttgtggggccctcctcgtgcccccacgatctggacagggatttcggggtgagggaagctgggctgggttgggcccccccaccgccgtgtgcaggaggaagaggccaggagaccagggcatgatggggcagctccccactgcaccccttctttcctgtgggctgtgcaggttttctttttgttttgggtgctggccccggtcctgtgggtcagggttcaaggcgccaaccccgcattgtctgcttggctcagtggttcccgtgtggagggttggggtgcctggtctgggggccttctgctccccagggggacaggtacagccaggtgtcaggacagggcagatcctctctctagctctccccccaaccactgcacccatagcccgtccctccctcttcctgcacacccttggctccctgtcccactccacggccaggcctttgtccctgctgagcccctcccctcccctagtgccttcccacccgcacccctggggtgctctctggggagccctggaagtccctgccctgcccagctgtctgctcacccccgcgccgcccaggatcacctcctcgtggggaggtctctcgggcagcctgctctgtggggccctcctgggcgggctgggcgtctggggggatcgtggggctttggggctgtcagcagcccaggggggtaagaggacgaggcccagatgggccagtggccctggggacaggctttccttagaaagtcactgggttcccgggcagagaacccccgcagcccactttttggccctgggctctgaccacagagtctgcagagcctggagcccggaggaggcccgcgggaagcttctggaaacaaaggtcgaatggagatgggggtcagggtgggttttattttccaggcattaaactcccttggctgccgcagaaaaccagaggcgcctcaggcggcttttgtccctcggagctgtggggttccctcatttccagtttgccaaggccgcctgggggctgcctccgtccttcccgcctcctgggccgtgcctcggcccacagagaccaccaccctccctccctcctggagtccctggagctctgggcagcctcccaccgtccacaactttgccaccctctcaggctgggcagacactacccccaactcggctccgtctccgagcgccagctgggtctgaggcgtctgttctgggctcttctcgcccacagacgagagggtcagggcagagcccaaggccagggagcagtgtccacgggtgggggcatgttcacaggccaggcgggcgccaggacggacgctggggtccaagtgcggcatggggttcgcgtgggccccccgccaggtgctgtggagtccgagtgggtcggctcaaggtcctggggtccccagcagccttcactgaactctgaagccagcctgcaggtgtcagacgtcaccgggatgatgctggggtggacggggccccgggccgcagggcgtgggccgcacacggtgggtgtcaggggcgagagtggctgcgtgcctcgatccggctggcccagggcgagtctgcctttcctgcctgaccccgcccctggagcttggcagggagttggggctggggctccccccacagtgcatcaccgcagccttgcctgttgagtagaaaggagctcggggagccaggccgtgccatccccaatgttccaggctctacctgggcccctctcacgccgtccctaggctgcccccaggcgtcctcccctcttagacggtggcagcgcggctgccctcaccctgccctgggcctggcccgcctccgtctggggtggtcgtggggtccccagcaggacacgtaagtacctgtgtgttgtcccgagcatcacccgctctgtggagggaaccccgaggcgtgggagcagtgggtagtctgcactccacaccgctggatcctagcaggagctcccggcttctgtaattaaacgatttattattaaagcagccgctttcccataaccggcttcctgtagccacaggggcagagccacccgcatgggtgtggggcagggaggtgcatggggtgagctggggcacccttctccccggggcacccaggggcggagtgggctgctgctgcctgggtgcccccgagggctcctgtccaggcccagggctgtgggctgggaggactcacggctttgctcctccgaggcggggcaggggctgtgatcagggccaggacagccccgtggggactctcgcagtcactggccctaagccttgttggtcctcggcagctggccccagggacaccaggtccctgcaggtgggtgctgcctgggagggaggggaggggtggggccagagtcccagggccgcagacctgccctgggtgtggcgtggagagccctctgtgtggccatgggcctggggagctgggaagcccaagtgtccttgtggatattggggtgtcgaggtgtggggcaagttggaggtcctagcgtgtttaagcagctgacgggcgcgaggtggaggtgtccaaaaggccgaggctggaagggggcagtagatggggtgctggtggccaggcagggaggaaaggggtgcggagctttgcaggggtttgggtgggtggcatcgggaggcccagcaggcaaaaggtggccagagccctggggtagtgggatgcccttccggagtgtgggatgaggcgtgctcccccacaacctccagaacagcggctgcgcctccaggcctcgggccccttcacgctggtgcggacggacgaagcccaaagcctctgctcctgggttctctctctcgctatttacttttttagtatttaacatgaaaaattttaaaaaattgtttactaacttaaccacaataataagccctttgtgtgttaacataacacgtccttttatggaaaaggttatatttctcaaaacgttaaaaactcagtgagaagaggggctgtgttttgcagttttgcaagaccctctgcctggcctggtggaagcatccgggaacgcccgtcggaggggtgagggaaggagggtggggctccccggccgccgtgctgagaaccactagtctaaaccagcaggctcaccccgggagaattcccctactcctgaaaggctgtgggtgttgacctgtgcacacagtggggcctcacaccacatgggagttgtggacattaacctgtgcacacagtgggacctcacgtcacgtggggctgtggacatttacctgtgcacacagtggggcctcacaccacatgggagttgtggacattaacctgtgcacacagtgggacctcacgtcacgtggggctgtgggcattgacctgcgtgcacagtagggcctcacatcatgcgggcctgtggaagttgacctgtgcatacagtgggcctcctgatacggggagctgtcacctagctggcctcacagtccatgcagccctgagacccaccacagagccgtggcccctcagatgaggggactgaagcagagagtctccaaggaagggcagaggtcctggcggcctcagtttgctcctccctctcatggcacccggctgaagtctcctgtggggctcctgggttcaaggccaccccatggccacgggccagctgcctttctctcatttctcctggagcgcacccttggtgggagctagaccccagagcccaggatatggaggtaactaatgtttcacagcagccaagcatgaatttagcccattgctgccaggatggggggctccatctcggggtgctggcatgaggctttcaacagctgcggtcagcacagcccacctggcccagcctggactctgcagggtggcagctggggtgtggccatggggagggagggagggaaggaaggatggggtcactgtagctctcgaagggaagcccctgccacgctcagggctgtctgggcccctccccaagcaggggcagaggtaccttccagaacacagcagaacagcgtgtgtccagcccccagctgggagaggagaggcgcccaatgttagtttaaaaaaaaatgactcagacagttcacagagccttccttttcctgctggcttccaagaattccgatctgacttaatggatcgagtcgttggtggatcgattcagacatggacgagagccaggatggccgagttggcgtggccctggcctcgaggctccccggggcccaggtctgcagccagctggcggtgggcaggcagggggccggcgggaggcccccacccgcaccttcacccccaacccccacgtccacccccccaccccccacctccacccccaccagccgggcctggccatggctccgtggtgggtctcagggctgcatggactgtgaggccagctaggtggtggctccgtgtatcaggagtcctactctacgcacaggtcaacttccacaggcccgcgtgatgtgaggccccactgcgcgcgcaggccaacgcccactgccccacgtaatgccctactgtgcgcgcgggccaacgcccactgccccacgtgacgtgaggccctactgtgcgcacaggttaatgtccacagcccttatgtggtgtgaggctctactgtgtgtgtaggtgtgcctaccaagggaagccctcctgcatgtggggtcccctgctgggttctggggagccccgggagggccactcaccttccccgcaggtccctttggtagttttgcattatacaggctggttgtggggcagggctttgagggggttgacaggagacagggtctggggccctcaggactccccactgctgtgtcgtcgctcctgctgggccctggcctgggctggatgcacccctgcccctccaccctgtagcctccagctcctaagcaccacccactctaggtccccgtctgctcgccgtgtcccgagcttgtccttcactgttgccgtgcccactgctgacagctggccccgtccatttactctcgtgtccgagaatctgaagcggtccctgacacacactagttactccgcagatgccggagggaggaggaggagaccagatctccttcctagaggaagatcctgggagtgggttttgagggctgcgtaggagtgttcccaggctgggcaggtaggtgggcagtgggcgttgcaggccgcgggcgagttgggctgggcttgggatggtgcgttgaggggcgtgtgccagtggcccctgcccgtctcgggcagaccttgggctgccattcctcctgcccggacccccagtgcaggctctgcaacagcctggagtttgaccccagttcctccgtctggacctggcctgggggctgccatgctcccaggacatcctggtggctgctgggtcccaaccccgttcgtggaggcgcctcccactcccatcgcccagtcacaggacacaccgtgtctagcgggctctgatctttacacctcatcgcagattggcttgcataatggctcagctgggttctagactttgggaatttcagcctaacccattaaacataaacgctgtgtggttacagatgctgtgtggttagagatgtttgtgctggagctgccctgactgtcggttctgagcttggagctctaattagtgcccgacggggcatctcacccaccacgggagggcaggggcgaggcgcagcagcaatgtctcggagctcccctgcccatccttgggtccagctgtgaggacagccaggcatgggtctgggagggctgtccccgcagagtggggtcggccgctcctactctcggcagcaccagggtctctgcatggaccccagctgccgtctctttctgcaggtgggcatggcaatgacctgtggctcgggctgaggaggcctggggccagtacttccccccatgctcagaggtgacgggcctgggctgctgtggggattccgagaatggaatctgggtctcaggtgaccccccaaccaaggggttccgggtttgtctgcacaggccccgggaccagccactgtagcagtgagcagggggctgatgggggtccgggggccggctgggcaccaagtctctgtgacccacaggggatgctcatgaagctcagtttatcagcccagaaaatgatggtgctgggaggggagcggggccgccccgccggggagctgcctctgtcctgcctcccctcggcccttcccccgcgtctcttcaccccaggggacggggagggggtcctaaggatgatgtggctttctgagggctgagtgtctgctacggctgctgtgaggatgttccgtggacagggtggcctgggtttggcttaggtgggggcagagtccccaggctgggaggaggcgctggaaaaggcctgggcagcctcactccctccccccaggagcttcccccaggccctccgcaccttctctgaaccctacactgaaccccaaaggtcactgacttcacaggctgccaccttcaggtgtctgtcctgggcggccctttttgtcattccactgacatttacaaaggacatctcggactctcggacccttggatttctaagtgacacaggctggatggagtttgactccaccaggggctgctgtcccccaggcctctcccagggccgatcccctccagggccgggtcccctgctgcccgggcctcagccccggctctgacatttacacactgcagccgccggcaccctcggagacagcctgaagttcagggccgagggccctcctcatggtacggtgcggggacggcgtctgaccgaggcccaccctgccgtcgccccggagtcccccaagctggcacagctagcggctcacggtcacacgtctgtcataggtttgagggctgaattctgaccggggcagagagtggaacgagctccaagtgagaaatggggtgttggggtggaagggaaggggccccccaggacaggcttgggagggggcgtcctagtgtgcttgggctgtgacagaaattctgaggacgtggtggccggggacagagggagtgtgtttctcggttctggaggctggacgtcccagggaagggctgggcaggatggggctccacgggggccacttctgggtgcagacgcctgcttctgcctgtgtcctcacctggtgggaggtggaggggtctctcggggtccttgttacaagggcattaaccccattcctgagggctccgccgctcctgacctcacctcatcccagtcacctcccaaaggccccactgggtctcagcgtctgaactccatggggacacaaactctccgtccccagcaggtgcccgggctgcgggcaccgccctttctccctgggacccccggggtctctcccgccccctctccctgaggcctcccccactccctctccctggggaccccatggtccctcccccaccccggaacccccccccccatggactctcctgccccctctccctggggcctcccccgccccctctccctggggaccccatggtcactcccccaccccggaaaccgcccccccatggactctcccgccccctctccatggggcacctcatggtccctcccggctctgcctgggatcccccaacgggctctcctgccccggctccttggatccctccatggtccctcccgccccctctttctggaccctcccccacggcctccccagccgcctcatttacgggcttcttctggtgcccccatattcatatctcagagtcctaacccacccccgagtccccatattcatatctcagagtcctaacccacccccccaagtgcctcagaatgtgactgtatttggagataagggccctttcgaagggggttaggactaggtgaggccacaggaggacacagatgcagaggggtgacagtggcgtctacaggccaaggacagcagccgcaggaggagccggccctgcccacagcatggtctcggactccagcctccaggctgtgggagagtgagcgtctgttgcttcagccgccgccatccagcagaccagcatccagccccaaaggggccacactgtccctcgggtccctccctgacccctggccaaacctggctcacccccggccaggagctcctgggcaggttgggcccagatgcccctgcccctgtctcctccaagctccagaagtcggggttggggtgaagagatgtggcggagtggccggggcaggcaggtgtggctgccagggcagaggaaggaccgaacggtggcatctccccagcagggtggccccgcgcccttgccagccccggaggaccagatggtggcatctccccagcaggctggccccgtgcccctcccagccccaccattttcctcgggataaactgaggctctgtgacctctgtcaggtcacagagaccctgttgggtggtgaatgggtgacccgtggacaccaggctgtggcgggtgtagggttcagccctccctgcacactgttactcagacctgcctgggaagcaaaaccacagcagagccacccctggctgggcctggccgtcgtctccccaggagtgagagctgtgcttttatctgacgcgcctcccgggactggtggaaggggtgtgtggcggccctgtgggtggggtttggcctcaggggctcctgggtagggtgagttgggggtccctgacctcagtcaccaggctgtggtggacggaaaccctggctgaccaggcatcggggattgggggcccccccatggactctcctgcccccgcgaggttggggaggtgggagagccgaccgagccgctgctgagtggctgttccgtcctcctcatttatttattgatgtgtgtgtgtgtcgttgttgttgctggtgtgatctcggctcaccccaatctccgcctcccgggttcaagcgattctcctgcctcagcctcctgaatagctgggattacaggcgcccgccaccatgcctggctaatttttgtattgttagtagagacgggattttatcatgttggccaggctggtcttgaactcctgacctcaagtgatccacccgcctcagcctcccaaagtgttgggatgacaggtgtgagccaccacgcccggcctcttttttttttttttttttttttgagatggagtcttgctctgtcgcccaggttggagtgcagtggcgtgatctccgctcactgcaacctctgcctcacgtgttcaagcgattctcctgcctcagcctcccacgtagctgggattacaggcatgtgccaccacgcccagctaattgttttgtatttttagtagagacggggtttcaccatcttggccaggctggtgttgaactcctgacctcatgatccacctgcctcggcctccaaaagtgctgggataacaggcgtgagccaccatgcccggcccggccttgttttttaatatacatctggttgccgggtgatactgagggggccgggctctgcaggcacagggctgaggggcgtcgtgtggatggacggccagcccgttgggtgccctggctgggtccctgtccctgcacaccgggtcagccggctcctgggtgcacaggcaggtggtgtgcgtccgcattgcagaacacggggcgttgcaggccggagctgggttttcacacagattgagaccaggcgtcgcccacagagcataatgtgaggcgagagggactcgggctgctgtgggctggggaggacggtcccatagctgggggcagagcagggcaggctgggtgaggagggggcaccccaggtgtctgaaccccaggtctgtggaggcccgaggtctgaagggaaatccccagtggtgggactggaggtgccgtggagggtgggcctgtgtcctggtgtccctggcgtccccataccccctccgaggcacagccacagtctctgggtcctgagcaggggctgcagtcacagccaggccgtgggggggccagggaggaggggctgctctccatagtgtgtcgggtggggagtggcccacctggccttggctttcccggggcaggtagggaggggcctgggtagggcggggcagggagggatgaggtgcagactggggagagtgcagggtgtgcagcgggggctgggatgccgccgaataggggcctgtggctcccacagggaggccccttaggtgaagaggaccagagtgaggtcagccctggtccacagccaccccgccctggactccccgggccagcacccgacctggccgccagcgtgctgaggacagacctgctgggccgcgttggcaggggctcaccccgtcttcccgcaggaaagcgccttggcgggactgcttccgccagcttcccggccagacccaagggtggagctccaggccacgttcccatggagggagcgcctggtcccctggggtggtctctaatttgggccacggcagctgtgcagtggcgctcaggcagttatttctggcctggagaattccagctcggagcaggccccacaggcccgtcccaggggcaggcggccgtcttccccaaggtcccctcctggctgggtttctgctgcccacgcctttcccttccaagcctgggggcccgcagcaccctcatatggggaccaagatgggcaagggtgaggccagaggagaggagctctcacccggcatggccggcccctccacctcccactccactgccaggacaaagccagcctgaccaggtggccctgaccggggacagctgccgagcccccggcaacggtgggagctgagccagcgctttgacgcccgcgtcggccaggagagtctgggggtctgctccagttccggcagaacatcctgggtggtcgtgcccccgaggtccttgccggtgtggctgcacgctgccaccaagtggctggcagggcctcaagcttcccgcaggcacggagaggagggctgggatcaggcacttttccactcaattatgccttgaaaagttcccaaatcaagctctttattagagataaataggtatattaggtctctttctaattagcatggcttttaaaattgtgcgcagttagagggagctgtccgcgtgtgctccagctccgtggtggtgctgcgagccaacctctcctttcattcctggaggtgggggacccgccctcatctcaggcctgaagagggctgtgtgtgagttctccacttgtgtgtggggtgagcccggcccatgcacacagctacacacacatcacacacccacacccggacacgcgcctcaggtccccacactgcccttacacacatgcgcccctcacacatgcatgtcccctttgcacacacgccccctcgcacacgcatgccccctcgcacacgcatgcacacaagctcactctgctgcctgtccctggctgctgtgtgcttccggccctccctgtctccccacacagatggacacaacgctccccagggtgagaagtggccgcccaggtgagcctggtgtttccccgggctgtggcaggggcaggagcagggtccgtgcctgagacagcgcaggtgatgtgattgttttggcccctccggtgggtggcaggtgggaggctctgcggggtggaggaggcgggcctcagcccacctgggtgcagcctggcggacatagaggcggaggccagggccgctctctgtggggccagagtctcccgaggccattgctcagggaggagctctgttgagatggaatgttccggcagccgggagtgagccgtccactcatgcatcagtgatttcaatcccccaggtggtggcctgtggtgggtgtgggctccccgcacccctgcgctgggggcggtgctctcccacgggcagcccagcccccgtgccctcctgtgacccgcggcgccggctggagacaaacactccatgtttggctgctgcccgggctccccacccccaactgcccgtgtgagtcacgcaagtccaggcggctggctccggccacgttcccctggccaggcccctggggagaggggctcccacatcgggggcctggctggggtgaaagctctgggcaggctgcacattgagactcagagcagactgggggttggctgggagaggccagggttgaggaccaggacagaggccaggagagctcgcagccccccgacgaggctgtcagtcactgtggcggggacccccaccctggccctcctctgacgttgcccagaccctctgttccctgcctgggatggggtgcaggtgacctctctggagctgagtcctgagtcctgggcccaacctgagagctccccaggtcaggagtcggccacagggtccatgggcactgcaggttctcaggagggcaagcccacctgtcccatctctggacaactgggtttccagggctggtacaggtacctgtgaaggaggtctgggccccacccaccacccccgcccccaccctctgtgacccgacacccccagcagcagggactggggtgggacacggtggggccccaggtggcggtttccaggaagttctgtgtcaggcatggagccctggaacccggtaccctccacccccgtgcggctgtgggaatcctggggctgccctcgggatctggcctctgggacccctgacgggttctattgcgtctgatggcgccgcgttcccccagttttcccccagcacagaggggttcttaggacctcaccccttcctgagttaaaaccctgcggtggcttctcccgagggaggagacgggcgtgggggccgccctcagcgtggagccgggaatccctcctggcccctccccccagccctgaccgggcttcctcctcccttgtctccatggcagcggcctccggggaaggaagagaaacctccttcagtcagcgcatccccggcaaccctgatcctggatcgtgtggctgccttgccctcccccttcccacccagttccctcccgctaagaggccccgctggagaacaggacacgtgcctgtcgtggcattggggtcgggggtccgggggaggcgccgcactcagggcaggctctggagctccccgggcaccgtcccgtcctgcaggtttgatgtactttctgtcatctaccctgtgaggctggggggcggccctggggggagcgtgcaagagcacatgcgtatacacgggtgagcacgtgacctggcgtgttgctcccccagtggggtctgtcccgtcccacctgctgggagactccaaagtctgcaaacatctggctccagaatttcgccactgcagagggagactgaattaattccctcctggatcggttaattaacgacaggtgccctggagccgtgtccatgccgcctggggaaggtgcgtctgcctcggcagctgtggctgccccggtgcttcatcggatgccagggacagaagagtcaaggccagctgggctgtgcctggcccatcaggcctaggtggagctggtaggggagatgggacaccagcccattgcacagggtgtaggcgggactgctctagaccccagggcatcactcctgcccacagggggcttccggtgcttcaggaatggtcaggcccagcctgccgcatgcatggggcccctccccgagccctgagaccagggagcagaccctggccaaagcttcccctgcagcaagcactgagtccttgaaagctttgggccttactgcccgaggcagaggccagaggccggactgtggaggccggcaagcgtgggaccgaggctcaggggtgaatggggccagcagccccagaggactccaggcggcttggcctgggcacctgcacacagcagctgtcctgtctttgagaggcatccgtggggagggctcatcacctgccggcctgggctgctcgtttcccggccctcaccctcatcctctgtgagcctgggaggaggcacggatgccgcatcagcctccaggcatccctgccctctcgtaggcatccaggccccctggtggaaggcaggtctcaaggggctggagggtgccaggagttgtcacgtggccgggtgggtctggggcatgtgagggccttctgctcagcgagagtggaggccacgtggcaggaggaggagacacccccaccaacctatgcctgcccatgtgccgggtctcaattcctggtccaaagggcgccttcagtggcgactgcagacaggtgcggggctccagcgaagggaagctgccatttaaaggcaaagctgggaacgcaggctgtggtgatgactgaagtgaggttcacgtaccatgggattagccatttttttttacttgtttatgtgacgaccagcggattttaaagcgcacgggttagcgaccttcgtgttgttgaaccatcacctctgcctagttctggaatgtttccctcactccagaaggaaaccgcatccccatcagccctcgctgcccagccctggcggtctctaccccgctttgtctctgggtttgcctgtgcgggactttccgtgtgacatgtggtccttctgtgcccagttcttcccagcatcatgttcccgggttcacctgtgttgtggcgtgtggagctttcttccttttcatggctgagtaatattccagcgtgtgaccagaccacgttccgtttgttcacgggtctgttggtgaacaccagggctgtttccatcacaggccatcggggtcagtgccgctgtggacacgcgtgggcccgtctgtcgtgagtgcccgtttcctttgtccctggtgtaggcaggattggcgttcatagcctcacccaccggttatccggagcttagacgtgcccgggtggcagctggactcctggacggtgtctgtgggtcctgccagcggcagccagactcccacatggacgctgccatctgcagagtccccccccccgccgagtctgcttttctggggaaccctggagatgctcagaaagcctagtggggcacgggggtccatggcgggtgagtagacggtcggcatgcatagggccgggggcggggtacgtggggggcgggcgagtagacggcatgtgtaggggccggaggcggggtgtgtacggggcgggtgagtagacggcatgtgtaggggccggaggcggggtgtgtacggggcgggtgagtagacggtcggcgtgcgtaggggccggaggcggggtgtgtacggggcaggtgagtagacggtcggcgtgcgtaggggccggaggcggggtacgtggggggcgggtgagtagacggtcggcgtgcgtaggggccggaggcggggtgtgtacggggcgggtgagtagacggtcagcgtgcgtaggggccggaggcggggtacgtggggggcgggtgagtagacggtcggcgtgcataggggccggaggcggggtgtgtacggggcgggtgagtagacggtcagcgtgcgtaggggccggaggcggggtacgtggggggcgggtgagtagacggtcggcgtgcgtaggggccggaggcgtggtgtgtacggggcgggtgagtagacggtcgggcggggtgtgtacggggcgggtgagtagacggtcggcgtgcgtaggggccggaggcggggtacgtggggggcgggtgagtagacggcgtgcgtaggggccggaggcggggtgtgtacggggcgggtgagtagacggcgtgcataggggccggaggcggggtgtgtatggggcgggtgagtagacggtcggcgtgcgtaggggccggaggcggggtgtgtacggggcgggtgagtagacggcgtaggggccggaggcggggtgtgtacggggcgggtgagtagacggcgtgcgtaggggccggaggcggggtgtgtacggggcgggtgagtagacggcgtaggggccggaggcggggtgtgtacggggcaggtgagtagacggcgtgcgtaggggccggaggcggggtgtgtacggggcgggtgagtagacggtcggcgtgcgtaggggccggaggcggggtgtgtgcagggccagggtgtaccgtgctggtcctcccagggctgcttggggagagcctgtttccttagtggtgttttgaataagaatgcgcggctccctcgaggtgtcccagtggggctgttcagaagctgggcccagggagccctgaaggcaggggtccagcctgccgtgaccgcacaggcccagattcctggacgtttcgctttcgtaattgcacacgcagggcctggattcgccgtgcagaaagccggacgatgccgcggcgtggggtgaacgtcaaagggtcactgtggactctgcccacgtcctgagtgccctcgtcttgtccctctccacggcgttctcatcctccggcgattccctgggaacgtctctgtacctctgcacacgtgcccacacacatgcccctcgagatggcctgcactgtggcttctgtcgtgaatgtggtcacgtgtcctccgtgactcgctcctcctgccccgtgtgccctggacctggctcggtcccgatgcccgtggcaccaccgcctcctcaacgggtggccacgtaatgcttcctggccggtgaatgtgccacggcagtggagatattctgcccttctagctcttctgtatacaagcagtgcgccctggttctcagggccgtgaccaccaccatgaccggcagacttcagggcggtccgtcccactcccgtggcctcgagggtcctttggagctgccgcggttctgagtgggggtggacacggacacagggctggttcccggggatctcctgtaccacccactgactcccagggtctgcggctggcccggcccctcctgggtctcttgatgtgggaccaaagctgttgcttcctctgcggcagaggcgatggagtccctcagagcccgcgaccgtcccctccgcactgcgggctgatagcgcctgtgggaatgggcttccccggtgaatacacataggtcgtcttcttgagcaaattggaaaagtaaggttgagcgttcctgagaatgaggggccgggaggggaggaggcggccagcgccgcgtggggccgtgggcagagcggacagggagggagcggcctcagccttggcaccctctacccagggcagggaggggtttgcccagccaggggtgggtacagagaggggagcacgtggctaagagtcctggttgcctgtgacctcagctgcagtctgtgccctgcaaggcatggggtcctgagtggggggctgtggcccaccttgctctgggcttctccttcctgctgtgggtgcctttcccgcccacacccctgcccctggctcaggccgcttgtgcccagctgttgcagatttggcctaatggggctcagctggctgagcagattgctctaggggacagcgggtggggcaggaacggcccagcctcccgatcctcccagctgcagagctctgccaccccggcactgatgtcaggatgcagccgagcagggagccctgctgggatccctggaggccacagccctgcttgggggccactctgaccatagaggaggagccaggcagcagccgcacctggagacgtccatcccttcgctgggctagcgctgctacagtcccctccctggtggtctgaggagctgaggctggcctgtggctttgatgccttaactatctcttgaggaggggcacacagccccgcctccgtccctctgtagaaacatctgtcctgaccttccttcggcaaacgtggaggtcttggtgtggtgagaacgtgtcctccagggccagcaggagccaggccgagccgtgtcagtcaggagagtagatggaggggcttgttttgcaggaaggtctgcataaaacctgtcagcgccagaaagatgaaatagcccttttgtacagatggggaagctgaggcttagaaagggggaggcacaggtggaggtagaattggggtcaggctcttgccccatggccctggcctgaggattagtcacggggcagggtcggggaggccctggccccaggatacgtgagccagcgggtctgggcggtcctgggagctgatgttacctgggatgttagctgatgtttcgggttggggttgtccaggaccaccctttgggccacgctggtcccacagcacacgggcttctgaggaacccctgtccctacccaggaccctggagaccgctggctctggggagaggggtcccacagcacctcagggctcagtcggcactgtttgggggtctggcagccccgacactggctgagccgccctgagactggctcctggccccaagaatcccaggtctccagcatcttcggcgcagagatagcagctgccagggttcccgccactcgcagacactccccctcacccagccgcgggaatgcaggccttgctgccccccacacaacagtcagtggctctggggctgcccacgcccgcgcccaggggccgggagaaaacggcgccttcagagctatgcgctttcaagctgggaagagcagtttgggagtctttttcctcctcgactacccccagatgagaaaacgggggtcagtggagcagctccactgaagctctgtgtttccggccaggaggccgcttcctcgccccctcctggatgtgtccccccacacctaaccccggccctcccagccctggtacatccaggacaggcccaggcgaggctgctgattcagcaccatggacagcagccgctgcagcactgcccgccctgcgtccacacctcctggcccgccaggggctggcatctgcggtgcactggagctgggccccttggagggcccccccaggtcctgagagctgaggggcttctgtggaccttggtgtgagccaccatggccacaggcggtgcccatgtgggaaggggagcgcttactgccgcagaaaggaggctggggggctgcctttgttccagggtcccgagggaagtggcggtgtgcaacaggaagcctgtaggggtgagaaaagctgttctcctcccggagactgaggagctggtgtccctgaagcgtcctgggcgggactggttttcttcatgggtgccagctggggaggcccagcccctggcagggcttcaggagtaggaagggggcttagcacctgcccagcccctcagaagtgcacaggcttggagatgtgaggaaggggaggtggccaggctgtgctggacctggcaggtgccctgaagagtgtcctttttttttttttttttttttttttttttttttttttgatatggggtcttgctccgtcacccagcctggagtgcagtggcacgatcgtggctcactgtagcttccacctcctggggtcaagcgatcctcccacttcagcctccccgagtagctgccaccacaccccaaaatttaatttttttgttaaatatttgttaaatattttgtagcaatggggtctcactgtgttgcccaggctggtctcagactcctgggttccaaatgatcctcctgcctcagcctcccaaagtgctgggattatgggtgtgaaccaccgggcccagcctgagagcactgattatagagtgtggggctgagggacaggatgggtactgtgcctgaggagtatttcaacagacagggccccaccaccgagggggtcttcagccctgttcccctgttcaggcctctctctggggggttttcatcgttacgagcccctggctcgtgagcccagtccagtgggggctgcctggggaacatgtcatccaggccagactccaggggctggagaaggacaatgtggtccccacaaccttggtctgtcagaaaagaggagaatcactgaggtcctggggcttggtccagggagatgaaggagggagggtgagtgggtgcattgctgctggttgggcctcagggtctggtggaggctccctgcctgagggagaccccgtagccaagaccacctcactgcgccactgcccggcccttccctggctgggttccctgaccgttctgccgccctgcagccagcaggccccctcccagggctgttcccggctacgttggcctgcttctccgacccgcagtggaaattgattctaatttatagaagttgatttgaaatctaaaggaatttttaattaaaacccagaaaatccatctgtatgattaagcctccagaagtcaccaggctccgtgcgacacagccggcagacactgcctgtcctcagctgcccacagaagtgtgacacatgagggccagcctgctcagcccagagctgcccgagcccctgctggcctgtgcgggatgtgggacctcggctgactgctcccctctctaggcagagccccaggggggcactgggacctggtacatctggcagtccctctccagggcagggagggctggtggctggggtgtgacccggttgggaggcgcgcaatacgcctgcctgtcacgtcctctgtcgtgagaggcctccttggggccccccagaccctgctataccaccgtcccctccagagctgccccacaggcacaggggtggggtccttgccattggaggagctctctgggattgtggggctaattttgggtgggtgctgggggaaggggaggcagaggatctacgatgggtaggggccctgcagacccaagagctgggacccgtcaggctggcctggctgtgtggcctcaggcacactcggggtctctctgacccagcaggctggcctggctgtgtggcctcaggcacactcggggtttcgctgacccagcatgctggcctggttgtgtggcctcaggcacactcggggtttcggtgacccagcaggctgccctggctgtgtggcctcaggcacactcggggtctctgacccagcaggctggcctggctgtgtggcctcaggcacactcggggtctctctgactcagcaggctggcctggctgtgtggcctcaggcacactcggggtctctctgactcagcaggctggcctggctgtgtggcctcaggcacactcggggtctctcttactcagcaggctggcctggctgtgtggcctcaggcacactcggggtctctgacccagcaggctggcctggctgtgtggcctcaggcacactcggggtctctcttactcagcaggctggcctggctgtgtggcctccggcacactcggggtctctgacccagcaggctggcctggctgtgtggcctcaggcacactcggggtttcggtgacccagcaggctggcctggctgtgtggcctcaggcacactcagggttttggtgacccagcaggctggcctggctgtgtggcctcaggcacacttggggtctctgacccagtaggctggcctggctgtgtggcctcaggcacactcggggtctctgacccagcaggctggcctggctgtgtggcctcaggcacactcggggtttcggtgacccagcaggctggcctggttgtgtggcctcaggcacactcagggttttggtgacccagcaggctggcctggctgtgtggcctcaggcacactcggggtctctgacccagtaggctggcctggctgtgtggcctcaggcacactcggggtctctgacccagcaggctggcctggctgtgtggcctcaggcacactcggggtttcggtgacccagcaggctggcctggttgtgtggcctcaggcacactcagggttttggtgacccagcaggctggcctggctgtgtgacctcaggcacactcggggtctctgcgagccgtcacctgtgcagcaccgcaggtccgggagatttggggttccattgtcgccaggcttagctcgggaggccgtctgcagctggcgtgcctgcaggcccaaccttgcccctctatggtcttctgctgtgtgtgtgattttggcggagggggatgcacctggatgggaggggctcactggagccacacccctgcttggaaaagacagcaccccatcccccactaaaccagacggtccgagaggtcggggaggggcacccaggccccctcctggcttccctcgctgccagtcacaaaggcttggggtgggtctcagtggcatggcagagggggcaaaggtgtccaggtaggaccctggcctggggacccctagtcagctgtctttgaggagttgctaggcactgggtgccacccacccctgccagcccctctgccgtgggcagctttcatggtgactggcactgatgggccctgggctctgacaccatccactccactctgctggctggacagtcttagagatggctggtcaggggtgctggccccttcccttctgtccccattgggccctccgcctcagggtctgggccgggtccagaagtcagcattcccctcagtgccaggaaggccatgccgtagctttagctcaaagtcctgagctggctagggtggcaggaactgccagggtcaggcaagtggctgggggccagctggggtacagggagggtgtgaaaggccttgtgtccaggtagccccctagcctagggcaccctctgctccagcctggacatttctggggggtctccggggtgatctgagagcaaacatggggcaggcctgggagaaatcgggcaatggctggagacatctggaggcgggtctcagccctcagtcctggagtccaggggtggctggaaattgcctgctttggtagtggaatgtgtgtgtgctggttgggagccggcccaacttgaaggagagtgtggagagaggagacagaaaggcggtccgaggcacccacaggacaagcagtcccaccaccccccattgggtagatgggtaaactgaggcctgggatgccctgtgcccagggagaggcagtgccacctacaagacccctggctcagccaggctggggtagagtgccgtgggggctcaggtcagggagcaccgttccccacacctgcctgctgtgtcctgtttgggccgggtgtctttgagctcctccccgccagcctgttccgtttacccaagaaaacccctcccctcgggaaatgatggccctcagagatgcacaaagacagtccccagccacccccgcagaaaggtgctatttgcggcagttaggggacaaaggtgcccgaggctgggggcggagccgccatccaccatcgctcccttgcactagtgccgggtcaggaggctgggagaggccaaggggcctggcacggcttccacagcagggcctcggctcctgcccccaccaccttgaccaaggcacgcaaaccccacccccacctcgtccagcaaggactgtgctctgaggcttgccgtgaaggcgctcacacactctggccgctggggtcgcagtgggtgcgtcatcggtaggcggcagtgcgtgctgtggcctcgcccacctatgggacagcgcgtggctgtgccagcatgccagctgccttggcgggaggctgatttcggctttcttgcagcagtgttacagcagaggcgcctgttaccgctgaacccattaagtgtaattaccgcactcttggtgggaatatgtaattacattggtggcctggagccgtggcactggcatcaaatgctgacctgctaggaggctgggccctggcttggtgggagggagggttccaggatgagctgctggggtccctgggggaggggctccaggctggagtgacaggtgggggcagggaaggccctcgtcaccaagcctgttcccctcctaccgtggcagctgcccttcctgtgatccctgagagtttgagacactcagaccctgaccccagtgctgcacgcagcacccaggacctccgctgtagtgagcgtggcccgtgttgggcagggggcgctgctgccaccatcatccgggtcccaagcaggcctgccaggggtgagggggagccgtgggcgctgaggcctgtggtctgcgccaggtgggtgctgggaagggcggcccccgagagtcaagcacaggcccaagtccagagccaggggtgggggcggccaccgggctgcccctgaatcagctgtaagaggatgcccagctctgtctcctcctcggttcccacgtgttggtgacggcagggactgtcagagctggtgcctgacttcccaaggctgttcgctgacaagttggtgctttccaaatgccggcttctaccttaaggaaggtccctcctgggtccacagtcagctgacggattgcctctccctccttcctctggttccctggtcagggtggggccgcgcagccctgggacaggggccctggaaagtctgccccgagttgtgccaccgtccaggcctggagggtgggacggggagtcctgtccggtgggttgcatggcggtgccccgacattccccctgccctggggccctcccagttgcacagggtgccctgcctacagccccccagcgcgggagccctatgcaacctgggccccatgtgggcagctaggccctgggagtctgagtggccctcactggggcctcactaccgatgcggccagcccaccgagggctcctgcaccccgctttcctgatgagccaacgccgagggccagggggccgggcctgggaccctcacggagcagagcccggccaggcgcaggccccaggcgccacctggtggctgctttcaggaggggcggccgtcggtcccgagtcccccaccccatcctggacacccccacgcgcgcacacccatggcggggcaccggctgaccgggtgggcatttggagggccccatgggagcgggtcccgggccgcgccggtgtgctccttaacccgcggcgacacatggttcgagcacgtgagcatgctggtaatcatgctcaactgcgtgaccctgggcatgttccggccctgtgaggacgttgagtgcggctccgagcgctgcaacatcctggaggtgaggggcgtgggtcggggtggggaaggagcgtgggtcgctacgaggtttatggttcaaggcggagtggggcgggggcggggcaaggttcaaggtggggcgtggagtgggtcagggtcggggatcagggcgaggttcacggcggggcgcgaggtggggctgggggtggggcagggcgagaggcgaggttcaaggcgaggcagggctcagttcctggggctcagggcggggcaggggcggggcgaggggtgtggcaagactgggggccgggctcttgcggggctggggttgggggttgtgggctgagctgagctgttccacgggccctcctgatgcctcctcccgcaggcctttgacgccttcattttcgccttttttgcggtggagatggtcatcaagatggtggccttggggctgttcgggcagaagtgttacctgggtgacacgtggaacaggctggatttcttcatcgtcgtggcggggtaggccccgcctgggagaggccacagcgctggcgaaggggccccgcccaccccacagggatccctgtgtcccacctgtaaagaaaaatgggaggtgtgttctagagggatccaggtagagccagggaccctgtctgggactccggagaccctccctcctgggcacaggtgagggaggtggcctcctgatgtgaccaagcgttgtgctcctgctacctcggggcccttcctggccagtacaaggtcctccgggtgccgggctggccggttctatgcctgcccaccctactttgcaccccagccccaccctggaccacctgggctccttgttgagctgctccccctcggccccgcccccagcatgatggagtactcgttggacggacacaacgtgagcctctcggctatcaggaccgtgcgggtgctgcggcccctccgcgccatcaaccgcgtgcctagtaagtgaccggccccgactgggcttgagatcaacaggcttgcgtgtccgccagccctgcagagctctcaaaagggcccccaggagcacaggactgggaaatgaaggttaccaggcactccggccccagcccagaccccagcagtggggtggcccctgccgctatccgtgggccttgcatgtcaggggagaatcaagctgcggtgtggtgggcagtcagcattcacagggtccctggctcccacacggccgagtgacaggggccactccgaacctccggttccttctctgcatggcatctggggcaaggctggaggccgagcagatccctggtggctttgctgtctggcgcatcctggtgtggctcgtggtggagacactcttgtgggtgtggctcagctcacctgggggctctgtgaagccccgccttcacacccacacaagtgaggggagagcctgacacctgtcctgaggacacctcgctctccccacccgccactgcttctggcccctactctcctgccaggatccccacctaaggaaaggggaagttggctggccagggctgggcctccgtgtcccctgctgagcagctgattttctagaaggaaggctggaaatccttcaggatttggccagcaggtgtgaggagggggcctggtggagaggagctgctgtgtgtctgctgtgcgctgggtgtgaggggaggcggaggaagagcttcagggaagtcatatgcctgcttgtttgggaaacatcctgtcaaatccgggccacccacctgcatcaggggatggggtgggatcgttctttaagcactcagggctacattcaactgctctggttcctgggggtcggcgcggcccccacgaggccgtaccaggcgcgagtgcatactgcgtgtagatgtggccccgtgtgtgcacgtgcgggtgtaacacagcctttctggctgcctgacctgggtcctggtggccttggcactcagggcttgacctgcagcaaccccccaaagtcacagacccccaaggctaggcactccttcccatggggcctctggcttcccgaagggcaggtgggtcatcctcgtgccgctggtccctgagcctgccttccacctgcctgccttggctctactgtgtggctcagatagggcttgaatactgtgtgactctgagcaactagctgagcctgaacctcagtttctcctggaatagtgcagtacaggagtaaccatgaccccaagggtggctgagcgtgcggtgaggggacgcgtgtgtggctcttggccctttgcccggcacccactgtacgctcagtctgcacgccggcctggccccacctgttgaagcgtgaagcaacccagcacacacagccccttccttccatggatgtttacttttcaggttaaattgccagagtggccctaattgtcgccagcagcctggcctcctggggacctgctcctgtctctaggagagaactagggaactcttccagactggataatacgcttctcataatgaggacacgctcagggctgcatcccgttctgttggctaggggtccactctgacctctggatcatctgtgatctttgaggcggttgcggtctggccagggcagtgctcactgattgtctgctccggtcggctcttttgacacttcagtgctcctcctggctctgactcacccttgtgacctgaggggcccgttttgccattgatacccctgggtgctgggtgagaactcagcgtccccaggttcctggcccagggctttacctgctgccttagcctggcccttgattaaatttgagggaaaggacgtcttgggggagcaggcccaggatggagcgaggggcgcgtggggcttggctgacccacttgctggattaatctggagttcacgtagcccatagcacccaggatcgatggcttcagtgctacctgctgaaaagccgctgccggtcctccccaccgcctccagcagcctctctctgagacggggctctgttctggcaggattctcactgggaatcagacaaagttttcaggatcccagacctgctgcagagacccccaggaggcagcccaccacctgaggttctggggctcccaaggctcctgctgccttggtggcaacttcagggtgtcgccagacaagcctcgagggccactgggctccgcctggtcatcccgagcccgagatgccacgtggtcagacctgccgcagccagttccctgcctcggccagtcccctgcctccactcctgcccctccacaccccagccctccaaaagcagcagacctgctgccctgggatggttggaggtggagacctggcgctccgctggatgcacgtcagaccccagggtgtcagtgtccctggaggccggtggtggtaggaggggagtcccgatcacactaggggtgcgggaaaatcaccagggggtggcccgagtcagtgtgcagtgggcgtggacacccactgtgaacagtggacggggctcgggggtcccgggaggggctgcagccccgaggacactcctgcagggcttagcagtgccaatcctggccctgctgcccacaggcatgcggatcctggtcactctgctgctggatacgctgcccatgctcgggaacgtccttctgctgtgcttcttcgtcttcttcattttcggcatcgttggcgtccagctctgggctggcctcctgcggaaccgctgcttcctggacagtgcctttgtcaggtgcccaggccccacccccgtgaggcccctgcccagatggccctgcccaccatgcagataacgcaccatgtggctccaccgccccacgtggctctgcccaccgtgcagtcacccgccccgccactgctgtccccgtcatggctccgtccaccatgctgtctctcgcccccaccccccatcatggctccgcccagctggcagtcaccgccccacatggctccgcccacggtgcagtcgctgcacatatgccccacccccatcatggctccgcccaccgtgcggtagctgcacatatgccccacccccatcatggctccacccaccgtgcggtcgctgcacatatgtcccacccccagtgccgccacctctcagcccccaagacaggttagtcccaacacttcatcccctccccacaccccagagtccgtcacaccttaccccagggtctcccctcggcccttgctctgcagtctctcctcagccctcaccccggggtcccctcaaccctcaccccgggttctcccctcaattctcacccccgagtctcccctcagccttcaccccagggtcccctgagcccacaccccggggttccctgccctcagccctcacccctggatcctctcagccctcaccccagggctgcctcctttccctcaccccaggcttccctcccctcgtcccttgccctttgcccctcatccgcttccaggaggagctgaggtctgagcctgggtttctggctcttgggtctccctccctgtttgtctgtgctgttctttgttgatttctctgtccatccctgttcttttgtgtttgtctctgtggacttgggctgaggagagtgtggtttctgcagcaccactgtgttcttgaccctggtcctggctgtgtcccctgatccgggtcttgaccctcagtcctatcatgccccctgaccctaaccgtgcctccctaaccatgattagtccactggccctgaccctgatcacgtccctgaccttgatcacgtccctgatcacaatcgtgcccccgactctgaccgtccctgaccctgattgtaccttttggccctggctgtgcccatccccaggaacaacaacctgaccttcctgcggccgtactaccagacggaggagggcgaggagaacccgttcatctgctcctcacgccgagacaacggcatgcagaagtgctcgcacatccccggccgccgcgagctgcgcgtgccctgcaccctgggctgggaggcctacacgcagccgcaggccgagggggtgggcgctgcacgcaacgcctgcatcaactggaaccagtactacaacgtgtgccgctcgggtgactccaacccccacaacggtgccatcaacttcgacaacatcggctacgcctggatcgccatcttccaggtgggcggcaagatggtgggacggggaccctggggcacggcaggggagcgggtgcaggactcgccccccccagcccagaccccaggggcacggggaggaggaggaggggtcgtgcgggcccaagtcaagccactgcccccccaggtgatcacgctggaaggctgggtggacatcatgtactacgtcatggacgcccactcattctacaacttcatctatttcatcctgctcatcatcgtgagtgtgggcggcagtgttcgccatgatgggccctggtgttagctggctgggggtggggtggggtacctgggtggtcataggggctcctgtctgtcttccagctgaagggagcacacaggggagggaggcagagcttgcgggggtggggaggtgtggctggggaccccaagaggccatggcatcacctagacagggtccaggcctgtgggtgctggctcagggctgaagagccaggaacaccctggggagtgcatagcctcccagcaccgctttccacgggcgtgtgtggccccaggtgtgctccttagctggtcctctcataggccccagtgggtcctggcagagttgggttaatcaggccgcagacgtctgtggggtcctaggtatacctagagccactctgcggggacctagtaggtaacagaagcagacagacgtccccagcttgttctgagagagcaagcgaagcaaacgattagagacttgttgcacgctggtccatgctaaggaggaaacgcacctggggtgctggggaggggagagtggccaccgttgagagggtcatctcaaggccagatctgcaggtaaaggaggggccgagccacatggagaagcaggaaagagggttccaggtcttttgtccagataggcacaaagcagctactgtatgccgtctgctccagacgtgggggctcagcactgaacaccgcagcagcctgcccatagcagggcacctcgcccactgtgcctatgacgcggcccccactcgaacaggcagcgcacagtagggctcagtggcgaatcagagactcgctcactcactgccacttacccgcccgcccccgtcacaggtgggctccttcttcatgatcaacctgtgcctggtggtgattgccacgcagttctcggagacgaagcagcgggagagtcagctgatgcgggagcagcgggcacgccacctgtccaacgacagcacgctggccagcttctctgagcctggcagctgctacgaagagctgctgaagtacgtgggccacatattccgcaaggtcaagcggcgcagcttgcgcctctacgcccgctggcagagccgctggcgcaagaaggtggaccccagtgctgtgcaaggccagggtcccgggcaccgccagcgccgggcaggcaggcacacagcctcggtgcaccacctggtctaccaccaccatcaccaccaccaccaccactaccatttcagccatggcagcccccgcaggcccggccccgagccaggcgcctgcgacaccaggctggtccgagctggcgcgcctccctcgccaccttccccaggccgcggaccccccgacgcagagtctgtgcacagcatctaccatgccgactgccacatagaggggccgcaggagagggcccgggtggcacatgccgcagccactgccgctgccagcctcaggctggccacagggctgggcaccatgaactaccccacgatcctgccctcaggggtgggcagcggcaaaggcagcaccagccccggacccaaggggaagtgggccggtggaccgccaggcaccggggggcacggcccgttgagcttgaacagccctgatccctacgagaagatcccgcatgtggtcggggagcatggtgaggacccagccccaccccacggaggaggcggtgggacctaggcagggcgggcagggtctccggtgtgtcattcccacacccattgtgggcactctgatgagcccagctttgacttgtgaaacagaccagctatgcctctggagtccataagaaggggaaagaggcaggtcccgcccctgacagcgccaaagcaagctcccggtggcccacagctcatggcaggagtggtagccgcggaggtgggattttgaatctgacaaggcttgtcagaccctcctgggccagcatcccattgcccctgcctggccccgagagggaccgtatgcttgtgtccacagcctggacgcttccctggaggacgtgcagcgtccttcgtggccattgaggctggccccccttctaggtggggacgctgagtgggggagtgtgggggaggcaccgtcgcagagtcaccgagagtcaggaagagaggctggcgtggggttctcctatgcggggcctgggcctctgtccaccaggtgaatgggagactccagggcccccagatggtagggttccacacgggcctgggggcccttcctggttctgtacacagatgtagagacgcaggcgggggtgtgtcccccgtggtggggagaggtgcgagcgagggtgccgagggtgccgggatgctgtgtgccctcatgcgctggtacccagggcgtgcagacgagtgtcgggcgcatgctcctagcccttgaattgtgggagtccagccgctgtgtgttataagaggcacacgggctccaaagacagcacgaaaacatcacaggacggctcgatggtcattttcatgtcagtttcgtgttggagtaaccatggtttgctcgcatcgagtcaaacagaatcccgtagctaacttcgcctgtgtgctgtggctgctgggaagtggctgctgttatatttctgtggatggcacagcccaaggcaggcaaacgtctctgcacctaagtgtgtccctgccccagtacgtgagcaggaatgcggctgtgggggttgggtgtgtgtgcccaggtgtgtgcccaaatgtatggcttttctgatgtttgtggctgctgtacccacgaactagtgggtttagaacagcggaaaatcactcagctctggaggccagtgctccaaaatccaggccttgcagggttgcttcctctggaggctctaggggagaactctcctcgcctctcctaagttctggcggttttgcaagtccccggcttgtcgacacgtccctgcggtctctctgtcttcacatggctctttggtttcttcttattggaacagtcgtggctcagggccctccctactccgggatagcttcattcctcattgtaacccatgacacctgcaaagatcctgctttctgtgaagtccagtcacaggttctggaggttggactctggatggatctttctgggggggacacattcaccccaccgctcctgtgtgtgagggttcccgggcccttgtggcagcaccactgagtgggcctgcccctgtctgtgccctctcccgcaggactgggccaggcccctggccatctgtcgggcctcagtgtgccctgccccctgcccagccccccagcgggcacactgacctgtgagctgaagagctgcccgtactgcacccgtgccctggaggacccggagggtgagctcagcggctcggaaagtggagactcagatggccgtggcgtctatgaattcacgcaggacgtccggcacggtgaccgctgggaccccacgcgaccaccccgtgcgacggacacaccaggcccaggcccaggcagcccccagcggcgggcacagcagagggcagccccgggcgagccaggctggatgggccgcctctgggttaccttcagcggcaagctgcgccgcatcgtggacagcaagtacttcagccgtggcatcatgatggccatccttgtcaacacgctgagcatgggcgtggagtaccatgagcaggtgcgggctggcctggccacggggtgggctccctgtcaggcttgcagggcctggggagtctcaggaggcttccagcagccccgatgcctgacctgatggtaggacggtcaggcagggccctagaaagccggggatggtgaggataggagaccaggtgtgccgagcctccactggaggggatctccttggattcctggcctcctctctagacggcagctgattaggctccttttgagatgctgctgcagccctcttgaccctttgggtcttgatgcagccaaacctgctcccagatcagtgccggggaggggtgggagccgtgggtggggccccagatcagtgccggggaggggtgggagccgcgggtggggccccagatcagtgccggggaggggtgggagccgcgggtggggccccagatcagtgccggggaggggtgggagccgcgggtggggccccagatcagtgccggggaggggtgggagccgcgggtgggggccccgatcagtgccggggaggggtgggagccgcgggtgggggcccagatcagtgccggggaggggtgggagccacgggtgggggccccagatc

SEQ ID NO: 15 - protein, 808 aa, Homo sapiens
GSRAAPVCSLTRGDTWFEHVSMLVIMLNCVTLGMFRPCEDVECGSERCNILEAFDAFIFAFFAVEMVIKMVALGLFGQKCYLGDTWNRLDFFIVVAGMMEYSLDGHNVSLSAIRTVRVLRPLRAINRVPTLQKQQTCCPGMVGGGDLALRWMHVRPQGMRILVTLLLDTLPMLGNVLLLCFFVFFIFGIVGVQLWAGLLRNRCFLDSAFVRNNNLTFLRPYYQTEEGEENPFICSSRRDNGMQKCSHIPGRRELRVPCTLGWEAYTQPQAEGVGAARNACINWNQYYNVCRSGDSNPHNGAINFDNIGYAWIAIFQVGGKMVGRGPWGTAGERVQDSPPPAQTPGARGGGGGVVRAQVKPLPPQVITLEGWVDIMYYVMDAHSFYNFIYFILLIIVGSFFMINLCLVVIATQFSETKQRESQLMREQRARHLSNDSTLASFSEPGSCYEELLKYVGHIFRKVKRRSLRLYARWQSRWRKKVDPSAVQGQGPGHRQRRAGRHTASVHHLVYHHHHHHHHHYHFSHGSPRRPGPEPGACDTRLVRAGAPPSPPSPGRGPPDAESVHSIYHADCHIEGPQERARVAHAAATAAASLRLATGLGTMNYPTILPSGVGSGKGSTSPGPKGKWAGGPPGTGGHGPLSLNSPDPYEKIPHVVGEHGLGQAPGHLSGLSVPCPLPSPPAGTLTCELKSCPYCTRALEDPEGELSGSESGDSDGRGVYEFTQDVRHGDRWDPTRPPRATDTPGPGPGSPQRRAQQRAAPGEPGWMGRLWVTFSGKLRRIVDSKYFSRGIMMAILVNTLSMGVEYHEQ

SEQ ID NO: 16 - DNA, 6740 bp, Homo sapiens
atggctgagagcgcctccccgccctcctcatctgcagcagccccagccgctgagccaggagtcaccacggagcagcccggaccccggagccccccatcctccccgccaggcctggaggagcctctggatggagctgatcctcatgtcccacacccagacctggcgcctattgccttcttctgcctgcgacagaccaccagcccccggaactggtgcatcaagatggtgtgcaacccgtggtttgaatgtgtcagcatgctggtgatcctgctgaactgcgtgacacttggcatgtaccagccgtgcgacgacatggactgcctgtccgaccgctgcaagatcctgcaggtctttgatgacttcatctttatcttctttgccatggagatggtgctcaagatggtggccctggggatttttggcaagaagtgctacctcggggacacatggaaccgcctggatttcttcatcgtcatggcagggatggtcgagtactccctggaccttcagaacatcaacctgtcagccatccgcaccgtgcgcgtcctgaggcccctcaaagccatcaaccgcgtgcccagtatgcggatcctggtgaacctgctcctggacacactgcccatgctggggaatgtcctgctgctctgcttctttgtcttcttcatctttggcatcataggtgtgcagctctgggcgggcctgctgcgtaaccgctgcttcctggaggagaacttcaccatacaaggggatgtggccttgcccccatactaccagccggaggaggatgatgagatgcccttcatctgctccctgtcgggcgacaatgggataatgggctgccatgagatccccccgctcaaggagcagggccgtgagtgctgcctgtccaaggacgacgtctacgactttggggcggggcgccaggacctcaatgccagcggcctctgtgtcaactggaaccgttactacaatgtgtgccgcacgggcagcgccaacccccacaagggtgccatcaactttgacaacatcggttatgcttggattgtcatcttccaggtgatcactctggaaggctgggtggagatcatgtactacgtgatggatgctcactccttctacaacttcatctacttcatcctgcttatcatagtgggctccttcttcatgatcaacctgtgcctcgttgtcatagcgacccagttctcggagaccaagcaacgggagcaccggctgatgctggagcagcggcagcgctacctgtcctccagcacggtggccagctacgccgagcctggcgactgctacgaggagatcttccagtatgtctgccacatcctgcgcaaggccaagcgccgcgccctgggcctctaccaggccctgcagagccggcgccaggccctgggcccggaggccccggcccccgccaaacctgggccccacgccaaggagccccggcactaccatgggaagactaagggtcagggagatgaagggagacatctcggaagccggcattgccagactttgcatgggcctgcctcccctggaaatgatcactcgggaagagagctgtgcccgcaacatagccccctggatgcgacgccccacaccctggtgcagcccatccccgccacgctggcttccgatcccgccagctgcccttgctgccagcatgaggacggccggcggccctcgggcctgggcagcaccgactcgggccaggagggctcgggctccgggagctccgctggtggcgaggacgaggcggatggggacggggcccggagcagcgaggacggagcctcctcagaactggggaaggaggaggaggaggaggagcaggcggatggggcggtctggctgtgcggggatgtgtggcgggagacgcgagccaagctgcgcggcatcgtggacagcaagtacttcaaccggggcatcatgatggccatcctggtcaacaccgtcagcatgggcatcgagcaccacgagcagccggaggagctgaccaacatcctggagatctgcaatgtggtcttcaccagcatgtttgccctggagatgatcctgaagctggctgcatttgggctcttcgactacctgcgtaacccctacaacatcttcgacagcatcattgtcatcatcagcatctgggagatcgtggggcaggcggacggtgggctgtcggtgctgcggaccttccggctgctgcgcgtgctgaaactggtgcgcttcatgcctgccctgcggcgccagctcgtggtgctcatgaagaccatggacaacgtggccaccttctgcatgctgctcatgctcttcatcttcatcttcagcatccttgggatgcatatttttggctgcaagttcagcctccgcacggacactggagacacggtgcccgacaggaagaacttcgactccctgctgtgggccatcgtcactgtgttccagatcctcacccaggaggactggaacgtcgttctctacaatggcatggcctccacttctccctgggcctccctctactttgtcgccctcatgaccttcggcaactatgtgctcttcaacctgctggtggccatcctggtggagggcttccaggcggagggtgacgccaatcgctcctactcggacgaggaccagagctcatccaacatagaagagtttgataagctccaggaaggcctggacagcagcggagatcccaagctctgcccaatccccatgacccccaatgggcacctggaccccagtctcccactgggtgggcacctaggtcctgctggggctgcgggacctgccccccgactctcactgcagccggaccccatgctggtggccctgggctcccgaaagagcagtgtcatgtctctagggaggatgagctatgaccagcgctccctgtccagctcccggagctcctactacgggccatggggccgcagcgcggcctgggccagccgtcgctccagctggaacagcctcaagcacaagccgccgtcggcggagcatgagtccctgctctctgcggagcgcggcggcggcgcccgggtctgcgaggttgccgcggacgaggggccgccgcgggccgcacccctgcacaccccacacgcccaccacattcatcacgggccccatctggcgcaccgccaccgccaccaccgccggacgctgtccctcgacaacagggactcggtggacctggccgagctggtgcccgcggtgggcgcccacccccgggccgcctggagggcggcaggcccggcccccgggcatgaggactgcaatggcaggatgcccagcatcgccaaagacgtcttcaccaagatgggcgaccgcggggatcgcggggaggatgaggaggaaatcgactacaccctgtgcttccgcgtccgcaagatgatcgacgtctataagcccgactggtgcgaggtccgcgaagactggtctgtctacctcttctctcccgagaacaggttccgggtcctgtgtcagaccattattgcccacaaactcttcgactacgtcgtcctggccttcatctttctcaactgcatcaccatcgccctggagcggcctcagatcgaggccggcagcaccgaacgcatctttctcaccgtgtccaactacatcttcacggccatcttcgtgggcgagatgacattgaaggtagtctcgctgggcctgtacttcggcgagcaggcgtacctacgcagcagctggaacgtgctggatggctttcttgtcttcgtgtccatcatcgacatcgtggtgtccctggcctcagccgggggagccaagatcttgggggtcctccgagtcttgcggctcctgcgcaccctacgccccctgcgtgtcatcagccgggcgccgggcctgaagctggtggtggagacactcatctcctccctcaagcccatcggcaacatcgtgctcatctgctgtgccttcttcatcatctttggcatcctgggagtgcagctcttcaagggcaagttctaccactgtctgggcgtggacacccgcaacatcaccaaccgctcggactgcatggccgccaactaccgctgggtccatcacaaatacaacttcgacaacctgggccaggctctgatgtccctctttgtcctggcatccaaggatggttgggtgaacatcatgtacaatggactggatgctgttgctgtggaccagcagcctgtgaccaaccacaacccctggatgctgctgtacttcatctccttcctgctcatcgtcagcttctttgtgctcaacatgtttgtgggtgtcgtggtggagaacttccacaagtgccggcagcaccaggaggctgaagaggcacggcggcgtgaggagaagcggctgcggcgcctggagaagaagcgccggaaggcccagcggctgccctactatgccacctattgtcacacccggctgctcatccactccatgtgcaccagccactacctggacatcttcatcaccttcatcatctgcctcaacgtggtcaccatgtccctggagcactacaatcagcccacgtccctggagacagccctcaagtactgcaactatatgttcaccactgtctttgtgctggaggctgtgctgaagctggtggcatttggtctgaggcgcttcttcaaggaccgatggaaccagctggacctggccattgtgctactgtcagtcatgggcatcaccctggaggagatcgagatcaatgcggccctgcccatcaatcccaccatcatccgcatcatgagggttctgcgcattgcccgagtgctgaagctgttgaagatggccacaggaatgcgggccctgctggacacggtggtgcaagctttgccccaggtgggcaacctgggcctcctcttcatgctgctcttcttcatctatgctgctctcggggtggagctctttgggaagctggtctgcaacgacgagaacccgtgcgagggcatgagccggcatgccaccttcgagaacttcggcatggccttcctcacactcttccaggtctccacgggtgacaactggaacgggatcatgaaggacacgctgcgggactgcacccacgacgagcgcagctgcctgagcagcctgcagtttgtgtcgccgctgtacttcgtgagcttcgtgctcaccgcgcagttcgtgctcatcaacgtggtggtggctgtgctcatgaagcacctggacgacagcaacaaggaggcgcaggaggacgccgagatggatgccgagctcgagctggagatggcccatggcctgggccctggcccgaggctgcctaccggctccccgggcgcccctggccgagggccgggaggggcgggcggcgggggcgacaccgagggcggcttgtgccggcgctgctactcgcctgcccaggagaacctgtggctggacagcgtctctttaatcatcaaggactccttggagggggagctgaccatcatcgacaacctgtcgggctccatcttccaccactactcctcgcctgccggctgcaagaagtgtcaccacgacaagcaagaggtgcagctggctgagacggaggccttctccctgaactcagacaggtcctcgtccatcctgctgggtgacgacctgagtctcgaggaccccacagcctgcccacctggccgcaaagacagcaagggtgagctggacccacctgagcccatgcgtgtgggagacctgggcgaatgcttcttccccttgtcctctacggccgtctcgccggatccagagaacttcctgtgtgagatggaggagatcccattcaaccctgtccggtcctggctgaaacatgacagcagtcaagcacccccaagtcccttctccccggatgcctccagccctctcctgcccatgccagccgagttcttccaccctgcagtgtctgccagccagaaaggcccagaaaagggcactggcactggaaccctccccaagattgcgctgcagggctcctgggcatctctgcggtcaccaagggtcaactgtaccctcctccggcaggtaccgacacctcccaggccctagagcactggtctgtgggcaaggggcaggatctaagccaggcctggaagtccaagggactgggaggggaaggacccaaccaaaggccgagggcaccaccgtgcaagggggtttgggaacgctggggtgacgctgagactggagggggaggtggcactggggcggatggagtgggcggggctgggtcctggggacagcagagtgtggggaggaccccaaggcgggtctggaagaggcctgtgatccctagcttgaggggaggggaggagaggaggaggagtactggaggttttgcagggtggcggggtgctggcagtggggaggacaccctgggtgctctgggtgggtgtgagtgggggcttgattactaggaatggaggtgggagggcgggtctggtggatgagaagcctcgggctgcagggtcccccgtactggattggccagggccacagccctcctacccacgggcacacagaggtctgaagcactgagggctccgctgtgggggtggggaaatggggccgggccggctcccacagtgagtgcagttgattcactgggtgactgtctgacccgtcacaccaggctgtgtgctctggcgggcaggacacaaactccctgcctgccgggctcactgtttagtgctgagagtgagctgcctgggtgcaggagggatgataaccaaaataaa

SEQ ID NO: 17 - protein, 2016 aa, Homo sapiens
MAESASPPSSSAAAPAAEPGVTTEQPGPRSPPSSPPGLEEPLDGADPHVPHPDLAPIAFFCLRQTTSPRNWCIKMVCNPWFECVSMLVILLNCVTLGMYQPCDDMDCLSDRCKILQVFDDFIFIFFAMEMVLKMVALGIFGKKCYLGDTWNRLDFFIVMAGMVEYSLDLQNINLSAIRTVRVLRPLKAINRVPSMRILVNLLLDTLPMLGNVLLLCFFVFFIFGIIGVQLWAGLLRNRCFLEENFTIQGDVALPPYYQPEEDDEMPFICSLSGDNGIMGCHEIPPLKEQGRECCLSKDDVYDFGAGRQDLNASGLCVNWNRYYNVCRTGSANPHKGAINFDNIGYAWIVIFQVITLEGWVEIMYYVMDAHSFYNFIYFILLIIVGSFFMINLCLVVIATQFSETKQREHRLMLEQRQRYLSSSTVASYAEPGDCYEEIFQYVCHILRKAKRRALGLYQALQSRRQALGPEAPAPAKPGPHAKEPRHYHGKTKGQGDEGRHLGSRHCQTLHGPASPGNDHSGRELCPQHSPLDATPHTLVQPIPATLASDPASCPCCQHEDGRRPSGLGSTDSGQEGSGSGSSAGGEDEADGDGARSSEDGASSELGKEEEEEEQADGAVWLCGDVWRETRAKLRGIVDSKYFNRGIMMAILVNTVSMGIEHHEQPEELTNILEICNVVFTSMFALEMILKLAAFGLFDYLRNPYNIFDSIIVIISIWEIVGQADGGLSVLRTFRLLRVLKLVRFMPALRRQLVVLMKTMDNVATFCMLLMLFIFIFSILGMHIFGCKFSLRTDTGDTVPDRKNFDSLLWAIVTVFQILTQEDWNVVLYNGMASTSPWASLYFVALMTFGNYVLFNLLVAILVEGFQAEGDANRSYSDEDQSSSNIEEFDKLQEGLDSSGDPKLCPIPMTPNGHLDPSLPLGGHLGPAGAAGPAPRLSLQPDPMLVALGSRKSSVMSLGRMSYDQRSLSSSRSSYYGPWGRSAAWASRRSSWNSLKHKPPSAEHESLLSAERGGGARVCEVAADEGPPRAAPLHTPHAHHIHHGPHLAHRHRHHRRTLSLDNRDSVDLAELVPAVGAHPRAAWRAAGPAPGHEDCNGRMPSIAKDVFTKMGDRGDRGEDEEEIDYTLCFRVRKMIDVYKPDWCEVREDWSVYLFSPENRFRVLCQTIIAHKLFDYVVLAFIFLNCITIALERPQIEAGSTERIFLTVSNYIFTAIFVGEMTLKVVSLGLYFGEQAYLRSSWNVLDGFLVFVSIIDIVVSLASAGGAKILGVLRVLRLLRTLRPLRVISRAPGLKLVVETLISSLKPIGNIVLICCAFFIIFGILGVQLFKGKFYHCLGVDTRNITNRSDCMAANYRWVHHKYNFDNLGQALMSLFVLASKDGWVNIMYNGLDAVAVDQQPVTNHNPWMLLYFISFLLIVSFFVLNMFVGVVVENFHKCRQHQEAEEARRREEKRLRRLEKKRRKAQRLPYYATYCHTRLLIHSMCTSHYLDIFITFIICLNVVTMSLEHYNQPTSLETALKYCNYMFTTVFVLEAVLKLVAFGLRRFFKDRWNQLDLAIVLLSVMGITLEEIEINAALPINPTIIRIMRVLRIARVLKLLKMATGMRALLDTVVQALPQVGNLGLLFMLLFFIYAALGVELFGKLVCNDENPCEGMSRHATFENFGMAFLTLFQVSTGDNWNGIMKDTLRDCTHDERSCLSSLQFVSPLYFVSFVLTAQFVLINVVVAVLMKHLDDSNKEAQEDAEMDAELELEMAHGLGPGPRLPTGSPGAPGRGPGGAGGGGDTEGGLCRRCYSPAQENLWLDSVSLIIKDSLEGELTIIDNLSGSIFHHYSSPAGCKKCHHDKQEVQLAETEAFSLNSDRSSSILLGDDLSLEDPTACPPGRKDSKGELDPPEPMRVGDLGECFFPLSSTAVSPDPENFLCEMEEIPFNPVRSWLKHDSSQAPPSPFSPDASSPLLPMPAEFFHPAVSASQKGPEKGTGTGTLPKIALQGSWASLRSPRVNCTLLRQVPTPPRP

SEQ ID NO: 18 - protein, 8 aa, Artificial Sequence
  Description of Artificial Sequence: Synthetic peptide
  MOD_RES (3): Variable amino acid
TMXTVGYG

SEQ ID NO: 19 - DNA, 1488 bp, Homo sapiens
atgacggtgatgtctggggagaacgtggacgaggcttcggccgccccgggccacccccaggatggcagctacccccgccaggccgaccacgacgaccacgagtgctgcgagcgcgtggtgatcaacatctccgggctgcgcttcgagacgcagctcaagaccctggcgcagttccccaacacgctgctgggcaaccctaagaaacgcatgcgctacttcgaccccctgaggaacgagtacttcttcgaccgcaaccggcccagcttcgacgccatcctctactactaccagtccggcggccgcctgcggaggccggtcaacgtgcccctggacatgttctccgaggagatcaagttttacgagttgggcgaggaggccatggagaagttccgggaggacgagggcttcatcaaggaggaggagcgccctctgcccgagaaggagtaccagcgccaggtgtggctgctcttcgagtaccccgagagctcggggcccgccagggtcatcgccatcgtctccgtcatggtcatcctcatctccatcgtcatcttttgcctggagacgctccccgagctgaaggatgacaaggacttcacgggcaccgtccaccgcatcgacaacaccacggtcatctacaattccaacatcttcacagaccccttcttcatcgtggaaacgctgtgcatcatctggttctccttcgagctggtggtgcgcttcttcgcctgccccagcaagacggacttcttcaaaaacatcatgaacttcatagacattgtggccatcattccttatttcatcaccctgggcaccgagatagctgagcaggaaggaaaccagaagggcgagcaggccacctccctggccatcctcagggtcatccgcttggtaagggtttttagaatcttcaagctctcccgccactctaagggcctccagatcctgggccagaccctcaaagctagtatgagagagctagggctgctcatctttttcctcttcatcggggtcatcctgttttctagtgcagtgtactttgccgaggcggaagaagctgagtcgcacttctccagtatccccgatgctttctggtgggcggtggtgtccatgaccactgtaggatacggtgacatgtaccctgtgacaattggaggcaagatcgtgggctccttgtgtgccatcgctggtgtgctaacaattgccctgcccgtacctgtcattgtgtccaatttcaactatttctaccaccgagaaactgagggggaagagcaggctcagttgctccacgtcagttcccctaacttagcctctgacagtgacctcagtcgccgcagttcctctactatgagcaagtatgagtacatggagatcgaagaggatatgaataatagcatagcccattatagacaggtcaatatcagaactgccaattgcaccacagctaaccaaaactgcgttaataagagcaagctactgaccgatgtttaa

SEQ ID NO: 20 - protein, 495 aa, Homo sapiens
MTVMSGENVDEASAAPGHPQDGSYPRQADHDDHECCERVVINISGLRFETQLKTLAQFPNTLLGNPKKRMRYFDPLRNEYFFDRNRPSFDAILYYYQSGGRLRRPVNVPLDMFSEEIKFYELGEEAMEKFREDEGFIKEEERPLPEKEYQRQVWLLFEYPESSGPARVIAIVSVMVILISIVIFCLETLPELKDDKDFTGTVHRIDNTTVIYNSNIFTDPFFIVETLCIIWFSFELVVRFFACPSKTDFFKNIMNFIDIVAIIPYFITLGTEIAEQEGNQKGEQATSLAILRVIRLVRVFRIFKLSRHSKGLQILGQTLKASMRELGLLIFFLFIGVILFSSAVYFAEAEEAESHFSSIPDAFWWAVVSMTTVGYGDMYPVTIGGKIVGSLCAIAGVLTIALPVPVIVSNFNYFYHRETEGEEQAQLLHVSSPNLASDSDLSRRSSSTMSKYEYMEIEEDMNNSIAHYRQVNIRTANCTTANQNCVNKSKLLTDV

SEQ ID NO: 21 - DNA, 1500 bp, Homo sapiens
atgacagtggccaccggagacccagcagacgaggctgctgccctccctgggcacccacaggacacctatgacccagaggcagaccacgagtgctgtgagagggtggtgatcaacatctcagggctgcggtttgagacccagctaaagaccttagcccagtttccagagaccctcttaggggacccaaagaaacgaatgaggtactttgaccccctccgaaatgagtactttttcgatcggaaccgccctagctttgatgccattttgtactactaccagtcagggggccgattgaggcgacctgtgaatgtgcccttagatatattctctgaagaaattcggttttatgagctgggagaagaagcgatggagatgtttcgggaagatgaaggctacatcaaggaggaagagcgtcctctgcctgaaaatgagtttcagagacaagtgtggcttctctttgaatacccagagagctcagggcctgccaggattatagctattgtgtctgtcatggtgattctgatctcaattgtcagcttctgtctggaaacattgcccatcttccgggatgagaatgaagacatgcatggtagtggggtgaccttccacacctattccaacagcaccatcgggtaccagcagtccacttccttcacagaccctttcttcattgtagagacactctgcatcatctggttctcctttgaattcttggtgaggttctttgcctgtcccagcaaagccggcttcttcaccaacatcatgaacatcattgacattgtggccatcatcccctacttcatcaccctggggacagagttggctgagaagccagaggacgctcagcaaggccagcaggccatgtcactggccatcctccgtgtcatccggttggtaagagtctttaggattttcaagttgtccagacactccaaaggtctccagattctaggtcagaccctcaaagccagcatgagagaattgggcctcctgatattctttctcttcataggggtcatccttttctctagtgctgtgtattttgcagaggccgatgagcgagagtcccagttccccagcatcccagatgccttctggtgggcagtcgtctccatgacaactgtaggctatggagacatggttccgactaccattgggggaaagatagtgggttccctatgtgcgattgcaggtgtgttaactattgccttaccggtccctgtcattgtgtccaatttcaactacttctaccaccgggagacagagggagaggagcaggcccaatacttgcaagtgacaagctgtccaaagatcccatcctcccctgacctaaagaaaagtagaagtgcctctaccattagtaagtctgattacatggagatccaggagggtgtaaataacagtaatgaggactttagagaggaaaacttgaaaacagccaactgtaccttggctaacacaaactatgtgaatattaccaaaatgttaactgatgtctga

SEQ ID NO: 22 - protein, 499 aa, Homo sapiens
MTVATGDPADEAAALPGHPQDTYDPEADHECCERVVINISGLRFETQLKTLAQFPETLLGDPKKRMRYFDPLRNEYFFDRNRPSFDAILYYYQSGGRLRRPVNVPLDIFSEEIRFYELGEEAMEMFREDEGYIKEEERPLPENEFQRQVWLLFEYPESSGPARIIAIVSVMVILISIVSFCLETLPIFRDENEDMHGSGVTFHTYSNSTIGYQQSTSFTDPFFIVETLCIIWFSFEFLVRFFACPSKAGFFTNIMNIIDIVAIIPYFITLGTELAEKPEDAQQGQQAMSLAILRVIRLVRVFRIFKLSRHSKGLQILGQTLKASMRELGLLIFFLFIGVILFSSAVYFAEADERESQFPSIPDAFWWAVVSMTTVGYGDMVPTTIGGKIVGSLCAIAGVLTIALPVPVIVSNFNYFYHRETEGEEQAQYLQVTSCPKIPSSPDLKKSRSASTISKSDYMEIQEGVNNSNEDFREENLKTANCTLANTNYVNITKMLTDV

SEQ ID NO: 23 - DNA, 1836 bp, Homo sapiens
cgttgctgtcgggccgctggacgagcgcctcagccttctgcgctcgccgccgccgccctcagcccgccaccgcgcccaccctcctcagcgcccagsagcagcggcggtgcccacacgctggtgaaccacggctacgcggagcccgccgcaggcgcgagctgccgcccgacatgaccgtggtgcccggggaccacctgctggagccggaggtggccgatggtggaggggccccgcctcaaggcggctgtggcggcggcggctgcgaccgctacgagccgctgccgccctcactgccggccgcgggcgagcaggactgctgcggggagcgcgtggtcatcaacatctccgggctgcgcttcgagacgcagctgaagaccctttgccagttccccgagacgctgctgggcgaccccaagcggcgcatgaggtacttcgacccgctccgcaacgagtacttcttcgaccgcaaccggcccagcttcgacgccatcctctactactatcagtccgggggccgcatccgccggccggtcaacgtgcccatcgacattttctccgaggagatccgcttctaccagctgggcgaggaggccatggagaagttccgcgaggacgagggcttcctgcgggaggaggagcggcccttgccccgccgcgacttccagcgccaggtgtggctgctcttcgagtaccccgagagctccgggccggcccggggcatcgccatcgtgtccgtgctggtcatcctcatctccattgtcatcttctgcctggagacgctgccggagttccgcgacgagaaggactaccccgcctcgacgtcgcaggactcattcgaagcagccggcaacagcacgtcggggtcccgcgcaggagcctccagcttctccgatcccttcttcgtggtggagacgctgtgcatcatctggttctccttcaaactgctggtgcggttcttcgcttgtcctagcaaagccaccttctcgcgaaacatcatgaacctgatcgacattgtggccatcattccttattttatcactctgggtaccgagctggccgaacgacagggcaatggacagcaggccatgtctctggccatcctgagggtcatccgcctggtaagggtcttccgcatcttcaagctgtcgcgccactccaaggggctgcagatcctcgggcaaacgctgaaggcgtccatgcgggagctgggattgctcatcttcttcctctttattggggtcatccttttctccagcgcggtctactttgccgaggcagacgaccccacttcaggtttcagcagcatcccggatgccttctggtgggcagtggtaaccatgacaacagtgggttacggcgatatgcacccagtgaccatagggggcaagattgtgggatctctctgtgccatcgccggtgtcttgaccatcgcattgccagttcccgtgattgtttccaacttcaattacttctaccaccgggagacagaaggggaagagcaatcccagtacatgcacgtgggaagttgccagcacctctcctcttcagccgaggagctccgaaaagcaaggagtaactcgactctgagtaagtcggagtatatggtgatcgaagaggggggtatgaaccatagcgctttcccccagacccctttcaaaacgggcaattccactgccacctgcaccacgaacaataatcccaactcttgtgtcaacatcaaaaagatattcaccgatgtttaatatgtgatacaagtgacatgctgtgctcagtattgtgtggaacgtgcccccttggtctgcctatgcccttgttttatacatttccagaccattc

SEQ ID NO: 24 - protein, 523 aa, Homo sapiens [sequence omitted]

SEQ ID NO: 25 - DNA, 3388 bp, Homo sapiens
ttaacaagtgatcgctgctgtctaggattttgtttcttttcgggggaaccttgacttcctttcccaggcaatccctcctgtgctgaactccagaggaaccaggagtcttggggtcttctctggggcagccccaacccccacccccaggctccagccgcgaggactctgtgcacccctcgggccaggcaacagaacttgttccgtggatatttggagcctccacctgccaaacccgagtgattccttttaccaccccccgccccccacccaggatcattcttcccctcctccagctgttgcagcttgagggggaaaaacaagccagccggtggattttctttatttttatttttcgccccgccggggaagggtgaagtgcttcttctgcatgattttggctgaagaatgctctgcatttccttgatttctatggagacctcagagctggttttgcttctgctgacacctcatctagcaccttctctacctcccagggtctttgcctctatctgtggtttggcattgtacctgggtacaggaagcctttgatgaacttaaaaggagagcctggagaatcatcctgatagactttgagtagaaatggctggacatacttcaaaccacatcttaacatggttcgagccatcactagaaggcaagtgctaacagtaaaggcttatttgcattttatttacatttaatggactgagcattggccaatttccatggcagaaaaatatatttcattttctaggcacaacttctggctgtcagacacttgctgcctttgaatcttgcagcaacatcactaaccacatcccagacatatttccaaatttcaacatctacccccaaaacataggtgtctgagagactccagcattttcggacttcttagtcttgagagtgccaggctatttatctcgaccagccaagctctggagagcaatgttgaatccctgagaagagagaggcatggggcgtgctgatttaaaaacagaaaatgcaaagttggagctgaaaatatccttagtcttccaagcaatctgcttaagggttccaaacttaccttaatttggtgagaaaagaagctgccctatttttctttcttcttcttctacaactggaaccagccatttccgaaaaccaccaccatggaggttgcaatggtgagtgcggagagctcagggtgcaacagtcacatgccttatggttatgctgcccaggcccgggcccgggagcgggagaggcttgctcactccaggcgagctgcagcacgtgctgttgcagcggccacagctgctgtcgaaggtagcgggggttctggtgggggctcccaccaccaccaccagtcacgcggggcctgtacctcccatgaccctcagagcagccggggtagtcgggaggaggaggcgacacggtctgagaagaagaaagcccactaccggcagagcagcttccctcattgctctgacctgatgcccagtggctctgaggagaagatcctgagggagctgagtgaggaggaggaagatgaggaggaggaggaagaggaggaagaggagggaaggttttactatagtgaagatgaccatggtgatgagtgttcctacacggatctgctgcctcaggatgagggcggtggcggctacagttcagtccgctacagtgactgttgtgaacgtgtggtgataaatgtgtcaggcctacgctttgagacccaaatgaaaactctggcccagtttccagagactttgttgggagaccctgaaaagaggactcagtactttgaccctttgcgcaatgagtatttttttgacaggaaccgccccagctttgatgccatcttgtattattatcaatcaggaggccgcctgaagaggccagtcaatgtcccctttgatatcttcactgaggaggtgaagttctatcagttgggggaggaggccctgttgaagtttcgggaggacgagggctttgtgagagaagaggaagacagggccctccccgagaatgaatttaaaaagcagatttggctcctctttgaatatccagagagctccgatcctgcaaggggcatagccattgtgtccgtcctggtcatcttaatctccattgtcatcttttgcctggaaaccttgcctgagtttagggacgacagggatctcgtcatggcactgagtgctggcgggcatggtgggttgttgaatgatacttcagcaccccatctggagaactcagggcacacaatattcaatgaccccttcttcatcgtggaaacagtctgtattgtatggttttcctttgagtttgtggttcgctgctttgcttgtcccagccaagcactcttcttcaaaaacatcatgaacatcattgacattgtctccattttgccttacttcatcacactgggcactgacctggcccagcaacaggggggtggcaatggtcagcagcagcaggccatgtcctttgccatcctcagaatcattcgtctggtccgagtattccggatcttcaaactctccaggcactccaaaggcctgcagatcctgggccacaccctcagagccagcatgcgggaactgggccttctgatcttcttcctcttcattggggtcatcctcttttctagtgctgtgtattttgcagaggcggatgaacctactacccatttccaaagcatcccagatgcattttggtgggctgtggtgaccatgacaactgtgggctatggggacatgaagcccatcactgtagggggcaagattgtcggggtcctgtgtgccattgcgggtgtcttaaccattgctttgccagtgccagtgattgtctctaactttaactatttctaccacagagagactgaaaatgaggaacagacacagctaacgcagaatgcagtcagttgtccatacctcccctctaatttgctcaagaaatttcggagctctacttcttcttccctgggggacaagtcagagtatctagagatggaagaaggagttaaggaatctctgtgtgccaaggaggagaagtgtcaggccaagggggatgacagtgagacagataaaaacaactgttctaatgcaaaggctgtggagactgatgtgtgaatcttttttttccacctgccactgctcccccctcagccatcttccaaatatatttatgcatagagagtgcagttatgaaaatgaaatatgcaaatgatccaatgcataccagtagtacactatttaatggttatacatggcataattgttactaaacttgtattacatatcaaataaatgatacatcttggagaagagggaggaataggagcaatctatctttatatttttattagaatgcaagaattttccacattaacctggaaaagatg

SEQ ID NO: 26 - protein, 653 aa, Homo sapiens [sequence omitted]

SEQ ID NO: 27 - DNA, 2755 bp, Homo sapiens
cagggccaagcgaggggatcgcgccagcaaccccagtctccccagagaggggccggccgacgctggagcggagcctgacgccaggcgccgcggagcgtgagtagggggcgcgggagccggtcagctggggcgcagcatgccctctgctcccgcgccatggagatcgccctggtgcccctggagaacggcggtgccatgaccgtcagaggaggcgatgaggcccgggcaggctgcggccaggccacagggggagagctccagtgtcccccgacggctgggctcagcgatgggcccaaggagccggcgccaaaggggcgcggcgcgcagagagacgcggactcgggagtgcggcccttgcctccgctgccggacccgggagtgcggcccttgcctccgctgccagaggagctgccacggcctcgacggccgcctcccgaggacgaggaggaagaaggcgatcccggcctgggcacggtggaggaccaggctctgggcacggcgtccctgcaccaccagcgcgtccacatcaacatctccgggctgcgctttgagacgcagctgggcaccctggcgcagttccccaacacactcctgggggaccccgccaagcgcctgcgctacttcgaccccctgaggaacgagtacttcttcgaccgcaaccggcccagcttcgacggtatcctctactactaccagtccgggggccgcctgcggaggccggtcaacgtctccctggacgtgttcgcggacgagatacgcttctaccagctgggggacgaggccatggagcgcttccgcgaggatgagggcttcattaaagaagaggagaagcccctgccccgcaacgagttccagcgccaggtgtggcttatcttcgagtatccggagagctctgggtccgcgcgggccatcgccatcgtctcggtcttggttatcctcatctccatcatcaccttctgcttggagaccctgcctgagttcagggatgaacgtgagctcgtccgccaccctccggcgccccaccagcctcccgcgcccgcccctggggccaacggcagcggggtcatggccccgccctctggccctacggtggcaccgctcctgcccaggaccctggccgaccccttcttcatcgtggagaccacgtgcgtcatctggttcaccttcgagctgctcgtgcgcttcttcgcctgccccagcaaggcagggttctcccggaacatcatgaacatcatcgatgtggtggccatcttcccctacttcatcaccctgggcaccgaactggcagagcagcagccagggggcggaggaggcggccagaatgggcagcaggccatgtccctggccatcctccgagtcatccgcctggtccgggtgttccgcatcttcaagctctcccgccactccaaggggctgcagatcctgggcaagaccttgcaggcctccatgagggagctggggctgctcatcttcttcctcttcatcggggtcatcctcttctccagtgccgtctacttcgcagaggctgacaaccagggaacccatttctctagcatccctgacgccttctggtgggcagtggtcaccatgaccactgtgggctacggggacatgaggcccatcactgttgggggcaagatcgtgggctcgctgtgtgccatcgccggggtcctcaccattgccctgcctgtgcccgtcatcgtctccaacttcaactacttctaccaccgggaaacggatcacgaggagccggcagtccttaaggaagagcagggcactcagagccaggggccggggctggacagaggagtccagcggaaggtcagcgggagcaggggatccttctgcaaggctggggggaccctggagaatgcagacagtgcccgaaggcagctgccccctagagaagtgtaacgtcaaggccaagagcaacgtggacttgcggaggtccctttatgccctctgcctggacaccagccgggaaacagatttgtgaaaggagattcaggcagactggtggcagtggagtagggaatgggaggcttgctgaacatggatatctacattataccgcagagtatttgaagtcacactgtaacctcagtctacccctctcctttcactcctttcctccctccctcgatccccccattttctctattctttccatgacacccaagggtcgcctatttttaaaaagtaccacattccatgacgcaggagctgtggaaatggtgagcgctgtgagatggatgtatttgtagccagtctcctatacccagcagagggataacccaaacaaaaatgactctaaatagcccagatcccaagagattatgtaactcctccatccagtgttccaaatttgctttacatatgattgtatttgtgtatagggcaaaatattatttttatgcctggtaagtggctttttgtactgtagttcagatagagatattttgggtatattttcaagatacatgttgtatttatggaagaaagagttgtcctgatgtttttctgtgttacttatattagagtcagagatcttggtatgggctgttctgtttcctgtgtctccaagcctctgtcttttctgggatgtggtattggtgctttgtgtctagggcagagtatgttcttgaagaaaggcaaatctgactttttctgtgcgccttaaacaattcttgtaactttcttcaaaaagcattttaatgatattggaggaatacttctgataatttattgtcttccc

SEQ ID NO: 28 - protein, 585 aa, Homo sapiens [sequence omitted]

SEQ ID NO: 29 - DNA, 4234 bp, Homo sapiens
aagcttactggtgaggcaagtgtgcgtctatttccatggcgccctggctcgcggcagcccctggctgggcgaggggtgtgatgtgggagtggggtgggagggggcagcaggcggggcctgccacgtcacttggagagtgtgtgttgggaaggaagggcagagcggagagccgagccgctgcagctgcggcggcggcagcgaagccttgagccgtggggaggtgggtccccggctcgggcgccggggcagccccgggcctctgcgaggcctgcggcgcggctcctagggaggaggtggcggctgtggcggccggaaccgcgaccttggccggacccagccccgcggtggacgcagggcggaggccgagccccgcaggagtctttgccgagccggaggaggcgcatctggcgcttcggtaccagcggcagccgggggtccggagcggctggaggagcgcagtggagaactgggaagagctagcccggctggagggcggacctctgcgtccgggagccggggtctcaaggcaccgctgggggcgaagcacggcgtcttttcgggcagccagtttcacacgcgcctgtgtgccggttccgggcatcccagtaagctctagcacccgggcgcgggtaacgggaagcgcagaaccaaatccccagcgcccaggtcacctccccagacccagccttgcagggaccagggctttagggctcacggacccaacggccaggtcagaccgcgaaccgggagagcgcggccccaccctaaagagggcgcacgggagctggggagcgggtgccgcgctccagagattgtgtcgtgggcgccgtcctagtggcggggagcgcacctccgagggggcatgagatcggagaaatcccttacgctggcggcgccgggggaggtccgtgggccggagggggagcaacaggatgcgggagacttcccggaggccggcgggggcgggggctgctgtagtagcgagcggctggtgatcaatatctccgggctgcgctttgagacacaattgcgcaccctgtcgctgtttccggacacgctgctcggagaccctggccggcgagtccgcttcttcgaccccctgaggaacgagtacttcttcgaccgcaaccggcccagcttcgacgccatcctctactactaccagtctgggggccgcctgcggaggccggtcaacgtgcccctggacattttcctggaggagatccgcttctaccagctgggggacgaggccctggcggccttccgggaggacgagggctgcctgcccgaaggtggcgaggacgagaagccgctgccctcccagcccttccagcgccaggtgtggctgctctttgagtacccagagagctctgggccggccaggggcatcgccatcgtctccgtgttggtcattctcatctccatagtcatcttttgcctggagaccttaccccagttccgtgtagatggtcgaggtggaaacaatggtggtgtgagtcgagtctccccagtttccagggggagtcaggaggaagaggaggatgaagacgattcctacacatttcatcatggcatcacccctggggaaatggggaccgggggctcctcctcactcagtactcttgggggctccttctttacagaccccttctttctggtggagacgctgtgcattgtctggttcacttttgagctcctggtgcgcttctccgcctgccctagcaagccggccttcttccggaacatcatgaacatcattgacttggtggctatcttcccctacttcatcaccctgggcactgagctggtgcagcagcaggagcagcaaccagccagtggaggaggcggccagaatgggcagcaggccatgtccctggccatcctccgagtcatccgcctggtccgggtgttccgcatcttcaagctctcccgccactccaaggggctgcagatcctgggcaagaccttgcaggcctccatgagggagctggggctgctcatcttcttcctcttcatcggggtcatcctcttctccagtgccgtctacttcgcagaggctgacgatgacgattcgctttttcccagcatcccggatgccttctggtgggcagtggttacaatgaccacggtaggttacggggacatgtaccccatgactgtggggggaaagatcgtgggctcgctgtgtgccatcgctggggtcctcaccattgccctgcctgtgcccgtcatcgtctccaacttcaactacttctaccaccgggagacggagcaggaggagcaaggccagtatacccacgtcacttgtgggcagcctgcgccggacctgagggcaactgacaacggacttggcaagcctgacttccccgaggctaaccgggaacggagacccagctaccttcctacaccacatcgggcctatgcagagaaaagaatgctcacggaggtctgacccatgcaggcagggcctgcaggaggggagcactgagctaacagtctcttaggcttccttctcatttccactactcactctagcttcagttgacttcttgactctctcccctacacccactacctggcatccaggaccaaatacctggactatcaaccttgttgcttaatccctgcagcattcaaggttaatccatctaagtgacatttttgaaattccagcggtgccacccaatcatgcccagcttctgtcatatgaatgagatatacatttatatgacagaagctgggcatgattgggtggcaccgctggaatttcaaaaatgtcaaggaacagcaaatgtcaacaggatggaaaccagccctatctgagtcttcgctccctccttagtgttctttgctttgggtcatgtgcgtttcctagcttcaggccacttggtaactggaagaagctggaggacagaagcagtactcaacttgctgttattccagtgccctgtaacaaccactggtcctcctgcagatgacccttggtagagtctttatttgcatagcctcaaaataggttattcgttctaaacttggatggaattagagaatacaatcaaactttaccacttggaggacacggggttagtccaggaccaaagaggccaatggatttttcaaagtgtgccccagcacacagaggcactggtgttcggtctacatttagttctccccactctgatcccctgactctccagcttccaggaaggttccttctcagagccaaatactctttgtgcaagtgccttcctgagcagaagaactggagaaagggaaccacagagccaggaggaatgtctgagcagagtcaagcaactggcttgaccacagtctgaagcaaggtgccacttaaacagatactgttttctcaaaggggcagaggaatcgtgttgcagatggcagccttttctccttcattttccccacattttctctggccctctaccttgcttcctgggagtttgatttaggattgctgttgaaggcttcctcaggcaaactccagcttaaagccctagacaggtaaaagcacacattggatggcagcatgggtttcttcccattttatgggcatgaaatatgtggtttagaataaggaacaagcattattcctttgccaacagcctcactctaagaggcttttttgctgagtcaagcaaacacttgcctgctctgccccttggaggtgcatttgacctgctctcactggtaaggtgacttggtggcgttcccacttgatttagccattttcttccattgtgagaccactgccatctatccacctgcccacctccccttttgtttctcagtaacattgccatttgttttttgcctttgataaactgtgatgtactgttctgagatcttttgggtgcagttctgaaactgaaaggactgttaacatgtttttaattttatatctatgctttcagactctttgatgataatttttttttttaaaaattatctctcgaagagcaacttacgagaggacagccttatgagggtttgcttgagaggcagtgtggcttctgtgactgccagctctaaatctcgatcttgccataactttacagggtaacttgggtccacagtcactctttgtgcctcagtttacccacccattaaatgggaacattactgtcttcccctccctacctcatggggaatgtctgggaagctggggacattgctatgcaaatgtgtgaatcttagtcatggatttgatttttag

SEQ ID NO: 30 - protein, 529 aa, Homo sapiens
MRSEKSLTLAAPGEVRGPEGEQQDAGDFPEAGGGGGCCSSERLVINISGLRFETQLRTLSLFPDTLLGDPGRRVRFFDPLRNEYFFDRNRPSFDAILYYYQSGGRLRRPVNVPLDIFLEEIRFYQLGDEALAAFREDEGCLPEGGEDEKPLPSQPFQRQVWLLFEYPESSGPARGIAIVSVLVILISIVIFCLETLPQFRVDGRGGNNGGVSRVSPVSRGSQEEEEDEDDSYTFHHGITPGEMGTGGSSSLSTLGGSFFTDPFFLVETLCIVWFTFELLVRFSACPSKPAFFRNIMNIIDLVAIFPYFITLGTELVQQQEQQPASGGGGQNGQQAMSLAILRVIRLVRVFRIFKLSRHSKGLQILGKTLQASMRELGLLIFFLFIGVILFSSAVYFAEADDDDSLFPSIPDAFWWAVVTMTTVGYGDMYPMTVGGKIVGSLCAIAGVLTIALPVPVIVSNFNYFYHRETEQEEQGQYTHVTCGQPAPDLRATDNGLGKPDFPEANRERRPSYLPTPHRAYAEKRMLTEV

SEQ ID NO: 31 - DNA, 1447 bp, Homo sapiens
acacgtcggttcgcgggtcgccggggctgcgcgcgccatggagccgcggtgcccgccgccgtgcggctgctgcgagcggctggtgctcaacgtggccgggctgcgcttcgagacgcgggcgcgcacgctgggccgcttcccggacactctgctaggggacccagcgcgccgcggccgcttctacgacgacgcgcgccgcgagtatttcttcgaccggcaccggcccagcttcgacgccgtgctctactactaccagtccggtgggcggctgcggcggccggcgcacgtgccgctcgacgtcttcctggaagaggtggccttctacgggctgggcgcggcggccctggcacgcctgcgcgaggacgagggctgcccggtgccgcccgagcgccccctgccccgccgcgccttcgcccgccagctgtggctgcttttcgagtttcccgagagctctcaggccgcgcgcgtgctcgccgtagtctccgtgctggtcatcctcgtctccatcgtcgtcttctgcctcgagacgctgcctgacttccgcgacgaccgcgacggcacggggcttgctgctgcagccgcagccggcccgttccccgctccgctgaatggctccagccaaatgcctggaaatccaccccgcctgcccttcaatgacccgttcttcgtggtggagacgctgtgtatttgttggttctcctttgagctgctggtacgcctcctggtctgtccaagcaaggctatcttcttcaagaacgtgatgaacctcatcgattttgtggctatccttccctactttgtggcactgggcaccgagctggcccggcagcgaggggtgggccagcaggccatgtcactggccatcctgagagtcatccgattggtgcgtgtcttccgcatcttcaagctgtcccggcactcaaagggcctgcaaatcttgggccagacgcttcgggcctccatgcgtgagctgggcctcctcatctttttcctcttcatcggtgtggtcctcttttccagcgccgtctactttgccgaagttgaccgggtggactcccatttcactagcatccctgagtccttctggtgggcggtagtcaccatgactacagttggctatggagacatggcacccgtcactgtgggtggcaagatagtgggctctctgtgtgccattgcgggcgtgctgactatttccctgccagtgcccgtcattgtctccaatttcagctacttttatcaccgggagacagagggcgaagaggctgggatgttcagccatgtggacatgcagccttgtggcccactggagggcaaggccaatggggggctggtggacggggaggtacctgagctaccacctccactctgggcacccccagggaaacacctggtcaccgaagtgtgaggaacagttgaggtctgcaggacctcacacctccctaga

SEQ ID NO: 32 - protein, 456 aa, Homo sapiens
MEPRCPPPCGCCERLVLNVAGLRFETRARTLGRFPDTLLGDPARRGRFYDDARREYFFDRHRPSFDAVLYYYQSGGRLRRPAHVPLDVFLEEVAFYGLGAAALARLREDEGCPVPPERPLPRRAFARQLWLLFEFPESSQAARVLAVVSVLVILVSIVVFCLETLPDFRDDRDGTGLAAAAAAGPFPAPLNGSSQMPGNPPRLPFNDPFFVVETLCICWFSFELLVRLLVCPSKAIFFKNVMNLIDFVAILPYFVALGTELARQRGVGQQAMSLAILRVIRLVRVFRIFKLSRHSKGLQILGQTLRASMRELGLLIFFLFIGVVLFSSAVYFAEVDRVDSHFTSIPESFWWAVVTMTTVGYGDMAPVTVGGKIVGSLCAIAGVLTISLPVPVIVSNFSYFYHRETEGEEAGMFSHVDMQPCGPLEGKANGGLVDGEVPELPPPLWAPPGKHLVTEV

SEQ ID NO: 33 - DNA, 1580 bp, Homo sapiens
tcccctagaatggatgtgtgtggctggaaagaaatggaggttgcgctggtcaattttgataattcagatgaaatccaagaagagccaggctatgccacagacttcgactcaaccagcccaaaaggccggcctgggggcagctccttctccaacgggaagatcctcatcagcgaaagcaccaaccatgagacggccttctccaagcttccgggagactatgctgaccccccagggcctgagccagtggtcctaaatgaaggaaaccagcgggtgatcatcaacattgctgggctgagatttgagacccagctcagaacccttagtcagttcccagagactctcctgggagaccgggagaaaaggatgcagttctttgactccatgagaaatgagtatttctttgatcggaaccggcccagttttgatggaatcctatattattaccaatctggtgggaaaattcggcgcccagccaatgttcccattgatatctttgctgatgaaatctccttctatgagctgggtagtgaggccatggaccagttccgggaggatgaaggcttcatcaaagaccctgaaacactgctacccaccaatgacatccaccgtcagttctggctcctctttgagtaccctgaaagttccagcgctgcccgtgctgtggccgtggtctcggtgttggttgtggtcatctccatcaccatcttctgcctggagacactgccagagttccgggaggatagggagctgaaggtggtcagagaccccaatctcaacatgagcaagacagtcctctcccagaccatgttcaccgaccctttcttcatggtggagtctacctgcatcgtgtggttcaccttcgagctggtgctccggttcgtggtctgccccagcaagactgacttcttcaggaacatcatgaacatcattgacatcatctccattatcccctactttgcaactctcatcacagagctagtccaggagacagagccgagtgcccaacagaacatgtccctggccatcctgaggatcatccgcctggtgagggtcttccgcatcttcaagctctcgcgccactccaaggggctgcagatcctcgggcaaacactgaaggcatccatgcgggagttggggttgctcatcttctttctcttcattggagtcatcctcttctccagtgcagtctactttgctgaggtggatgagccagagtcccatttctctagcattcctgatggcttctggtgggcagtggtcaccatgacaactgtaggctatggggacatgtgcccgaccaccccaggggggaagattgtgggcactctgtgtgccattgcaggggtcctcaccattgccctccctgtgcctgtcattgtctccaacttcaattacttctaccaccgggagactgagaatgaagaaaagcagaacatcccaggagaaattgaaagaatcctcaacagtgtaggctcaagaatgggcagcacagactctcttaataagaccaatggtggctgttccacagagaagtctaggaaatgatcagtccagggcttcttgggtccatcctgtctctc

SEQ ID NO: 34 - protein, 511 aa, Homo sapiens
MDVCGWKEMEVALVNFDNSDEIQEEPGYATDFDSTSPKGRPGGSSFSNGKILISESTNHETAFSKLPGDYADPPGPEPVVLNEGNQRVIINIAGLRFETQLRTLSQFPETLLGDREKRMQFFDSMRNEYFFDRNRPSFDGILYYYQSGGKIRRPANVPIDIFADEISFYELGSEAMDQFREDEGFIKDPETLLPTNDIHRQFWLLFEYPESSSAARAVAVVSVLVVVISITIFCLETLPEFREDRELKVVRDPNLNMSKTVLSQTMFTDPFFMVESTCIVWFTFELVLRFVVCPSKTDFFRNIMNIIDIISIIPYFATLITELVQETEPSAQQNMSLAILRIIRLVRVFRIFKLSRHSKGLQILGQTLKASMRELGLLIFFLFIGVILFSSAVYFAEVDEPESHFSSIPDGFWWAVVTMTTVGYGDMCPTTPGGKIVGTLCAIAGVLTIALPVPVIVSNFNYFYHRETENEEKQNIPGEIERILNSVGSRMGSTDSLNKTNGGCSTEKSRK

SEQ ID NO: 35 - DNA, 2577 bp, Homo sapiens
atgccggcgggcatgacgaagcatggctcccgctccaccagctcgctgccgcccgagcccatggagatcgtgcgcagcaaggcgtgctctcggcgggtccgcctcaacgtcggggggctggcgcacgaggtactctggcgtaccctggaccgcctgccccgcacgcggctgggcaagctccgcgactgcaacacgcacgactcgctgctcgaggtgtgcgatgactacagcctcgacgacaacgagtacttctttgaccgccacccgggcgccttcacctccatcctcaacttctaccgcactgggcgactgcacatgatggaggagatgtgcgcgctcagcttcagccaagagctcgactactggggcatcgacgagatctacctggagtcctgctgccaggcccgctaccaccagaagaaagagcagatgaacgaggagctcaagcgtgaggccgagaccctacgggagcgggaaggcgaggagttcgataacacgtgctgcgcagagaagaggaaaaaactctgggacctactggagaagcccaattcctctgtggctgccaagatccttgccataatttccatcatgttcatcgtcctctccaccattgccctgtccctcaacacgctgcctgagctacagagcctcgatgagttcggccagtccacagacaacccccagctggcccacgtggaggccgtgtgcatcgcatggttcaccatggagtacctgctgaggttcctctcctcgcccaagaagtggaagttcttcaagggcccactcaatgccattgacttgttggccattctgccatactatgtcaccattttcctcaccgaatccaacaagagcgtgctgcaattccagaatgtccgccgcgtggtccagatcttccgcatcatgcgaattctccgcatccttaagcttgcacgccactccactggcctccagtctctgggcttcactttgcggaggagctacaatgagttgggcttgctcatcctcttccttgccatgggcattatgatcttctccagccttgtcttctttgctgagaaggatgaggacgacaccaagttcaaaagcatcccagcctctttctggtgggccaccatcaccatgactactgttgggtatggagacatctaccccaagactctcctggggaaaattgttgggggactctgctgcattgcaggagtcctggtgattgctcttcccatccccatcatcgtcaataacttctctgagttctataaggagcagaagagacaggagaaagcaatcaaacggcgagaggctctggagagagccaagaggaatggcagcatcgtatccatgaacatgaaggatgcttttgcccggagcattgagatgatggacattgtggttgagaaaaatggggagaatatgggtaagaaagacaaagtacaagataaccacttgtctcctaacaaatggaaatggacaaagaggacactgtctgaaaccagctcaagtaagtcctttgaaaccaaggaacagggatcccctgaaaaagccagatcgtcttctagtcctcagcacctgaacgttcagcagttggaagacatgtacaataagatggccaagacccaatcccaacccatcctcaataccaaggagtcagcagcacagagcaaaccaaaggaagaacttgaaatggagagtatccccagccccgtagcccctctgcccactcgcacagaaggggtcattgacatgcgaagtatgtcaagcattgatagtttcattagctgtgccacagacttccctgaggccaccagattctcccacagccctttgacatcactccccagcaagactgggggcagcacagccccagaagtgggctggcggggagctctgggtgccagtggtggtaggtttgtggaggccaaccccagccctgatgccagccagcactctagtttcttcatcgagagccccaagagttccatgaaaactaacaaccctttgaagctccgagcacttaaagtcaacttcatggagggtgaccccagtccactcctccccgttctagggatgtaccatgaccctctcaggaaccgggggagtgctgcggctgctgtcgctggactggagtgtgccacgcttttggacaaggctgtgctgagcccagagtcctccatctacaccacagcaagtgctaagacacccccccggtctcctgagaaacacacagcaatagcgttcaactttgaggcgggtgtccaccagtacattgacgcagacacagatgatgagggacagctgctctacagtgtggactccagcccccccaaaagcctccctgggagcaccagtccgaagttcagcacggggacaagatcggagaaaaaccactttgaaagctcccctttacccacctcccctaagttcttaaggcagaactgtatttactccacagaagcattgactggaaaaggccccagtggtcaggaaaagtgcaaacttgagaaccacatctcccctgacgtccgtgtgttgccagggggaggagcccatggaagcacacgagatcagagcatctga

SEQ ID NO: 36 - protein, 858 aa, Homo sapiens [sequence omitted]

SEQ ID NO: 37 - DNA, 2435 bp, Homo sapiens
ccatggcagaaaaggcacctcctggcttaaacaggaagacttcaaggtcgacactttcccttcctccagagcctgtggacattatccggagcaaaacatgctccaggagagttaagatcaatgtggggggcctcaaccacgaagtcctgtggagaacgctggacaggctgcccaggacgcgcctggggaagcttcgagactgcaacacacacgagagcctcctggaagtgtgcgacgactataatctgaacgagaacgagtatttctttgatcggcatccaggagccttcacttccattttaaatttctaccggaccgggaaactccatatgatggaagaaatgtgtgcactttcgtttggccaagaacttgattactgggggattgatgagatctacttggagtcctgctgccaggccagatatcatcaaaaaaaagaacaaatgaacgaagaactgaggcgagaggcagagactatgcgagacggagaaggagaagagtttgataatacctgctgccctgataaaaggaagaaactgtgggacttgctggagaaacctaactcatcagtggctgcaaagatcctggccatcgtgtctatcctgttcattgtgctttccaccattgctttgtctctcaatacgctgccggagctgcaggaaacggacgaatttggacaactcaatgacaaccgccaattagcacacgtggaggctgtgtgtattgcatggtttaccatggagtaccttttgcgattcttatcctcaccaaataaatggaagttcttcaaaggcccactgaatgtcattgatttgctggccatcttgccgtactatgtcaccatttttctgacggagtccaacaagagcgtgctgcagttccaaaacgtgaggcgcgtggtccagatcttccgaatcatgcgcatcctcaggatcctgaaactcgccaggcattcgacaggcctgcagtctctgggtttcacccttaggcggagttacaatgaattgggcttgttgatattgtttctggccatggggataatgatattttccagcctggtattttttgctgagaaggatgaagatgctaccaagttcaccagtatccctgcatcattttggtgggccaccatcaccatgaccactgttggctatggtgacatttaccctaaaacattactagggaaaattgtgggaggtctgtgctgtattgctggggttctggttattgcccttcctatcccaattattgtgaacaatttttctgagttttacaaggagcagaaacgccaagagaaagcaattaaaaggagggaggctcttgagcgggccaaaaggaacggaagcatcgtttctatgaacttaaaagatgccttcgctcgaagtatggaactgatagatgtggctgttgagaaggccggagagtccgccaacacaaaggactccgccgacgataatcacctgtcgccaagccggtggaagtgggccaggaaggctctgtcggaaacaagctccaacaagtctttcgagaataagtaccaggaggttagccaaaaagactcccacgagcagctgaacaacacgttttcctccagcccacagcatctgagtgcccagaaactggagatgctatacaatgaaattaccaagacacagcctcattctcacccaaacccagactgccaagaaaagcctgagaggccatctgcatatgaagaagagattgaaatggaagaagtggtgtgtccacaggagcagctggccgtggcacagaccgaggtcattgtggacatgaagagcacctccagcatcgacagcttcaccagctgtgccaccgacttcacagagacagagagatcgccgctgccgccgccctccgcctctcacttgcagatgaagttcccaaccgacctcccagggacagaagagcaccaaagagctaggggccccccgtttctaactctatccagagagaaaggacctgctgccagggatggcacgctggagtatgccccagttgacataactgtgaacctcgatgccagtggctcccagtgtgggctacatagtcctttgcagtctgacaatgccaccgacagtcctaagagctctctaaaaggcagcaacccactaaagtccagatccctcaaagtgaactttaaggaaaatagaggcagtgcaccacagaccccgcccagcacagccaggccactgccagtcaccacagctgacttttcgctcactaccccgcagcacatcagtaccatcctcttagaagaaaccccctcccagggagacagaccttgctgggcactgaggtttcagcgccttgtcagggaccttccaaagggctgtcccccaggtttcccaagcagaaactgttccctttctcttcaagagagaggaggagcttcactgaaatagacactgggaatt

SEQ ID NO: 38 - protein, 806 aa, Homo sapiens
MAEKAPPGLNRKTSRSTLSLPPEPVDIIRSKTCSRRVKINVGGLNHEVLWRTLDRLPRTRLGKLRDCNTHESLLEVCDDYNLNENEYFFDRHPGAFTSILNFYRTGKLHMMEEMCALSFGQELDYWGIDEIYLESCCQARYHQKKEQMNEELRREAETMRDGEGEEFDNTCCPDKRKKLWDLLEKPNSSVAAKILAIVSILFIVLSTIALSLNTLPELQETDEFGQLNDNRQLAHVEAVCIAWFTMEYLLRFLSSPNKWKFFKGPLNVIDLLAILPYYVTIFLTESNKSVLQFQNVRRVVQIFRIMRILRILKLARHSTGLQSLGFTLRRSYNELGLLILFLAMGIMIFSSLVFFAEKDEDATKFTSIPASFWWATITMTTVGYGDIYPKTLLGKIVGGLCCIAGVLVIALPIPIIVNNFSEFYKEQKRQEKAIKRREALERAKRNGSIVSMNLKDAFARSMELIDVAVEKAGESANTKDSADDNHLSPSRWKWARKALSETSSNKSFENKYQEVSQKDSHEQLNNTFSSSPQHLSAQKLEMLYNEITKTQPHSHPNPDCQEKPERPSAYEEEIEMEEVVCPQEQLAVAQTEVIVDMKSTSSIDSFTSCATDFTETERSPLPPPSASHLQMKFPTDLPGTEEHQRARGPPFLTLSREKGPAARDGTLEYAPVDITVNLDASGSQCGLHSPLQSDNATDSPKSSLKGSNPLKSRSLKVNFKENRGSAPQTPPSTARPLPVTTADFSLTTPQHISTILLEETPSQGDRPCWALRFQRLVRDLPKGCPPGFPSRNCSLSLQERGGASLK

SEQ ID NO: 39 - DNA, 696 bp, Homo sapiens
ttccttacctacatcgagggcgtctgtgtggtctggttcaccttcgagttcctcatgcgtgtcatcttctgccccaacaaggtagagttcatcaagaactcgctcaacatcattgactttgtggccatcctgcccttctacctggaggtggggctgagcggcctgtcctccaaggcagccaaggacgtgctgggcttcctgcgcgtcgtccgcttcgtgcgcatcttgcgcatctttaagctgacccgccactttgtgggcctgcgggtcctgggccacacgctccgagccagcaccaacgagttcctgctgctcatcatcttcctggccttgggcgtgctgatcttcgccaccatgatctactacgccgagaggataggggcacagcccaatgaccccagcgccagtgagcacacgcactttaagaacatccccatcggcttctggtgggccgtggtcaccatgacgaccctgggctatggagacatgtacccgcagacgtggtccggcatgctggtgggggctctgtgtgcgctggcgggcgtgctcaccatcgccatgcccgtgcccgtcatcgtgaacaatttcgggatgtattactccttagccatggctaagcagaaactaccaaagaaaaaaaagaagcatattccgcggccaccgcagctgggatctcccaattattgtaaatctgtc

SEQ ID NO: 40 - protein, 232 aa, Homo sapiens
FLTYIEGVCVVWFTFEFLMRVIFCPNKVEFIKNSLNIIDFVAILPFYLEVGLSGLSSKAAKDVLGFLRVVRFVRILRIFKLTRHFVGLRVLGHTLRASTNEFLLLIIFLALGVLIFATMIYYAERIGAQPNDPSASEHTHFKNIPIGFWWAVVTMTTLGYGDMYPQTWSGMLVGALCALAGVLTIAMPVPVIVNNFGMYYSLAMAKQKLPKKKKKHIPRPPQLGSPNYCKSV

SEQ ID NO: 41 - DNA, 1964 bp, Homo sapiens
agtcatgtctgagccacagagatgggcaagatcgagaacaacgagagggtgatcctcaatgtcgggggcacccggcacgaaacctaccgcagcaccctcaagaccctgcctggaacacgcctggcccttcttgcctcctccgagcccccaggcgactgcttgaccacggcgggcgacaagctgcagccgtcgccgcctccactgtcgccgccgccgagagcgcccccgctgtcccccgggccaggcggctgcttcgagggcggcgcgggcaactgcagttcccgcggcggcagggccagcgaccatcccggtggcggccgcgagttcttcttcgaccggcacccgggcgtcttcgcctatgtgctcaattactaccgcaccggcaagctgcactgccccgcagacgtgtgcgggccgctcttcgaggaggagctggccttctggggcatcgacgagaccgacgtggagccctgctgctggatgacctaccggcagcaccgcgacgccgaggaggcgctggacatcttcgagacccccgacctcattggcggcgaccccggcgacgacgaggacctggcggccaagaggctgggcatcgaggacgcggcggggctcgggggccccgacggcaaatctggccgctggaggaggctgcagccccgcatgtgggccctcttcgaagacccctactcgtccagagccgccaggtttattgcttttgcttctttattcttcatcctggtttcaattacaactttttgcctggaaacacatgaagctttcaatattgttaaaaacaagacagaaccagtcatcaatggcacaagtgttgttctacagtatgaaattgaaacggatcctgccttgacgtatgtagaaggagtgtgtgtggtgtggtttacttttgaatttttagtccgtattgttttttcacccaataaacttgaattcatcaaaaatctcttgaatatcattgactttgtggccatcctacctttctacttagaggtgggactcagtgggctgtcatccaaagctgctaaagatgtgcttggcttcctcagggtggtaaggtttgtgaggatcctgagaattttcaagctcacccgccattttgtaggtctgagggtgcttggacatactcttcgagctagtactaatgaatttttgctgctgataattttcctggctctaggagttttgatatttgctaccatgatctactatgccgagagagtgggagctcaacctaacgacccttcagctagtgagcacacacagttcaaaaacattcccattgggttctggtgggctgtagtgaccatgactaccctgggttatggggatatgtacccccaaacatggtcaggcatgctggtgggagccctgtgtgctctggctggagtgctgacaatagccatgccagtgcctgtcattgtcaataattttggaatgtactactccttggcaatggcaaagcagaaacttccaaggaaaagaaagaagcacatccctcctgctcctcaggcaagctcacctactttttgcaagacagaattaaatatggcctgcaatagtacacagagtgacacatgtctgggcaaagacaatcgacttctggaacataacagatcagtgttatcaggtgacgacagtacaggaagtgagccgccactatcacccccagaaaggctccccatcagacgctctagtaccagagacaaaaacagaagaggggaaacatgtttcctactgacgacaggtgattacacgtgtgcttctgatggagggatcaggaaaggatatgaaaaatcccgaagcttaaacaacatagcgggcttggcaggcaatgctctgaggctctctccagtaacatcaccctacaactctccttgtcctctgaggcgctctcgatctcccatcccatctatcttgtaaaccaaaccctcgtgccgaatcttggc

SEQ ID NO: 42 - protein, 638 aa, Homo sapiens
MGKIENNERVILNVGGTRHETYRSTLKTLPGTRLALLASSEPPGDCLTTAGDKLQPSPPPLSPPPRAPPLSPGPGGCFEGGAGNCSSRGGRASDHPGGGREFFFDRHPGVFAYVLNYYRTGKLHCPADVCGPLFEEELAFWGIDETDVEPCCWMTYRQHRDAEEALDIFETPDLIGGDPGDDEDLAAKRLGIEDAAGLGGPDGKSGRWRRLQPRMWALFEDPYSSRAARFIAFASLFFILVSITTFCLETHEAFNIVKNKTEPVINGTSVVLQYEIETDPALTYVEGVCVVWFTFEFLVRIVFSPNKLEFIKNLLNIIDFVAILPFYLEVGLSGLSSKAAKDVLGFLRVVRFVRILRIFKLTRHFVGLRVLGHTLRASTNEFLLLIIFLALGVLIFATMIYYAERVGAQPNDPSASEHTQFKNIPIGFWWAVVTMTTLGYGDMYPQTWSGMLVGALCALAGVLTIAMPVPVIVNNFGMYYSLAMAKQKLPRKRKKHIPPAPQASSPTFCKTELNMACNSTQSDTCLGKDNRLLEHNRSVLSGDDSTGSEPPLSPPERLPIRRSSTRDKNRRGETCFLLTTGDYTCASDGGIRKGYEKSRSLNNIAGLAGNALRLSPVTSPYNSPCPLRRSRSPIPSIL

SEQ ID NO: 43 - DNA, 3129 bp, Homo sapiens
gggcggcggggctggcagcagtggctgcccgcactgcgcccgggcgctcgccttcgctgcagctcccggtgccgccgctcgggccggccccccggcaggccctcctcgttatggccgcggcctcctccccgcccagggccgagaggaagcgctggggttggggccgcctgccaggcgcccggcggggcagcgcgggcctggccaagaagtgccccttctcgctggagctggcggagggcggcccggcgggcggcgcgctctacgcgcccatcgcgcccggcgccccaggtcccgcgccccctgcgtccccggccgcgcccgccgcgcccccagttgcctccgaccttggcccgcggccgccggtgagcctagacccgcgcgtctccatttacagcacgcgccgcccggtgttggcgcgcacccacgtccagggccgcgtctacaacttcctcgagcgtcccaccggctggaaatgcttcgtttaccacttcgccgtcttcctcatcgtcctggtctgcctcatcttcagcgtgctgtccaccatcgagcagtatgccgccctggccacggggactctcttctggatggagatcgtgctggtggtgttcttcgggacggagtacgtggtccgcctctggtccgccggctgccgcagcaagtacgtgggcctctgggggcggctgcgctttgcccggaagcccatttccatcatcgacctcatcgtggtcgtggcctccatggtggtcctctgcgtgggctccaaggggcaggtgtttgccacgtcggccatcaggggcatccgcttcctgcagatcctgaggatgctacacgtcgaccgccagggaggcacctggaggctcctgggctccgtggtcttcatccaccgccaggagctgataaccaccctgtacatcggcttcctgggcctcatcttctcctcgtactttgtgtacctggctgagaaggacgcggtgaacgagtcaggccgcgtggagttcggcagctacgcagatgcgctgtggtggggggtggtcacagtcaccaccatcggctatggggacaaggtgccccagacgtgggtcgggaagaccatcgcctcctgcttctctgtctttgccatctccttctttgcgctcccagcggggattcttggctcggggtttgccctgaaggtgcagcagaagcagaggcagaagcacttcaaccggcagatcccggcggcagcctcactcattcagaccgcatggaggtgctatgctgccgagaaccccgactcctccacctggaagatctacatccggaaggccccccggagccacactctgctgtcacccagccccaaacccaagaagtctgtggtggtaaagaaaaaaaagttcaagctggacaaagacaatggggtgactcctggagagaagatgctcacagtcccccatatcacgtgcgaccccccagaagagcggcggctggaccacttctctgtcgacggctatgacagttctgtaaggaagagcccaacactgctggaagtgagcatgccccatttcatgagaaccaacagcttcgccgaggacctggacctggaaggggagactctgctgacacccatcacccacatctcacagctgcgggaacaccatcgggccaccattaaggtcattcgacgcatgcagtactttgtggccaagaagaaattccagcaagcgcggaagccttacgatgtgcgggacgtcattgagcagtactcgcagggccacctcaacctcatggtgcgcatcaaggagctgcagaggaggctggaccagtccattgggaagccctcactgttcatctccgtctcagaaaagagcaaggatcgcggcagcaacacgatcggcgcccgcctgaaccgagtagaagacaaggtgacgcagctggaccagaggctggcactcatcaccgacatgcttcaccagctgctctccttgcacggtggcagcacccccggcagcggcggcccccccagagagggcggggcccacatcacccagccctgcggcagtggcggctccgtcgaccctgagctcttcctgcccagcaacaccctgcccacctacgagcagctgaccgtgcccaggaggggccccgatgaggggtcctgaggaggggatggggctgggggatgggcctgagtgagaggggaggccaagagtggccccacctggccctctctgaaggaggccacctcctaaaaggcccagagagaagagccccactctcagaggccccaataccccatggaccatgctgtctggcacagcctgcacttgggggctcagcaaggccacctcttcctggccggtgtgggggccccgtctcaggtctgagttgttaccccaagcgccctggcccccacatggtgatgttgacatcactggcatggtggttgggacccagtggcagggcacagggcctggcccatgtatggccaggaagtagcacaggctgagtgcaggcccaccctgcttggcccagggggcttcctgaggggagacagagcaacccctggaccccagcctcaaatccaggaccctgccaggcacaggcagggcaggaccagcccacgctgactacagggccaccggcaataaaagcccaggagcccatttggagggcctgggcctggctccctcactctcaggaaatgctgacccatgggcaggagactgtggagactgctcctgagcccccagcttccagcaggagggacagtctcaccatttccccagggcacgtggttgagtggggggaacgcccacttccctgggttagactgccagctcttcctagctggagaggagccctgcctctccgcccctgagcccactgtgcgtggggctcccgcctccaacccctcgcccagtcccagcagccagccaaacacacagaaggggactgccacctccccttgccagctgctgagccgcagagaagtgacggttcctacacaggacaggggttccttctgggcattacatcgcatagaaatcaataatttgtggtgatttggatctgtgttttaatgagtttcacagtgtgattttgattattaattgtgcaagcttttcctaataaacgtggagaatcaca

SEQ ID NO: 44 - protein, 676 aa, Homo sapiens [sequence omitted]

SEQ ID NO: 45 - DNA, 3464 bp, Homo sapiens
gacgaggggcagcggaggaccccgcagggcatcgggctcctggccaagaccccgctgagccgcccagtcaagagaaacaacgccaagtaccggcgcatccaaactttgatctacgacgccctggagagaccgcggggctgggcgctgctttaccacgcgttggtgttcctgattgtcctggggtgcttgattctggctgtcctgaccacattcaaggagtatgagactgtctcgggagactggcttctgttactggagacatttgctattttcatctttggagccgagtttgctttgaggatctgggctgctggatgttgctgccgatacaaaggctggcggggccgactgaagtttgccaggaagcccctgtgcatgttggacatctttgtgctgattgcctctgtgccagtggttgctgtgggaaaccaaggcaatgttctggccacctccctgcgaagcctgcgcttcctgcagatcctgcgcatgctgcggatggaccggagaggtggcacctggaagcttctgggctcagccatctatgcccacagcaaagaactcatcacggcctggtacatcggtttcctgacactcatcctttcttcatttcttgtctacctggttgagaaagacgtcccagaggtggatgcacaaggagaggagatgaaagaggagtttgagacctatgcagatgccctgtggtggggcctgatcacactggccaccattggctatggagacaagacacccaaaacgtgggaaggccgtctgattgccgccaccttttccttaattggcgtctccttttttgcccttccagcgggcatcctggggtccgggctggccctcaaggtgcaggagcaacaccgtcagaagcactttgagaaaaggaggaagccagctgctgagctcattcaggctgcctggaggtattatgctaccaaccccaacaggattgacctggtggcgacatggagattttatgaatcagtcgtctcttttcctttcttcaggaaagaacagctggaggcagcatccagccaaaagctgggtctcttggatcgggttcgcctttctaatcctcgtggtagcaatactaaaggaaagctatttacccctctgaatgtagatgccatagaagaaagtccttctaaagaaccaaagcctgttggcttaaacaataaagagcgtttccgcacggccttccgcatgaaagcctacgctttctggcagagttctgaaggtaatgcctttttatctccctccctgtctcttccacttcttcctcccccaagtccacttccttcctcacctctccctttgcccacttaagaacctttgactccacaaggtaactctctcccttccctcgacaagccaacttcttgcttccctaactcctcctgtcccttgggctgaggcattgtgatgtattcccaggagtctagggctgcaggctcccaagttaggagcctggaaacctgtcaccttggtttctgagggtccgccccgaccccccgccccatgattggattgttatggaggtcaacttgaaggatggggcggtgccaggtgcaaagcaatttagagaccagggcacgggaagagtggcagaaaagcgccctctggaggctgtaggagccatggcctcatgtgcctcttttacttatgcaaagggaggacatgcagaaaagcctgtttcctcagtgtctgagcccacccaggccctcaatcctcattgtatcattcagttctctccaaggcctctgatgtgtgcggctcagaaagtgacttctccaaggtcaccaggatagagactgacagagcaaaagtcccagctgaggcctgcacagtgtgtgttgtttgctggcttctgtgtcctttgctggcttctggctctgggggccactctggaactgcggagctcacttctcctccctgctagccttttccctcactaccagtcatgagctgcgcacacttttgacttggacttctgggtaatagaatgagggtgccaagaaaggctgaacagcatcacagcttgagaataccgtggagtcttgcaacgtggaaataaagactctggggattgacacatccagaggcgtggaaggctttgaccgaacagtggggtccccaagccttttccaggtctgtggcctgccgttcatatgtgtgtctccctcccagatgccgggacaggtgaccccatggcggaagacaggggctatgggaatgacttccccatcgaagacatgatccccaccctgaaggccgccatccgagccgtcagaattctacaattccgtctctataaaaaaaaattcaaggagactttgaggccttacgatgtgaaggatgtgattgagcagtattctgccgggcatctcgacatgctttccaggataaagtaccttcagacgagaatagatatgattttcacccctggacctccctccacgccaaaacacaagaagtctcagaaagggtcagcattcaccttcccatcccagcaatctcccaggaatgaaccatatgtagccagaccatccacatcagaaatcgaagaccaaagcatgatggggaagtttgtaaaagttgaaagacaggttcaggacatggggaagaagctggacttcctcgtggatatgcacatgcaacacatggaacggttgcaggtgcaggtcacggagtattacccaaccaagggcacctcctcgccagctgaagcagagaagaaggaggacaacaggtattccgatttgaaaaccatcatctgcaactattctgagacaggccccccggaaccaccctacagcttccaccaggtgaccattgacaaagtcagcccctatgggttttttgcacatgaccctgtgaacctgccccgagggggacccagttctggaaaggttcaggcaactcctccttcctcagcaacaacgtatgtggagaggcccacggtcctgcctatcttgactcttctcgactcccgagtgagctgccactcccaggctgacctgcagggcccctactcggaccgaatctccccccggcagagacgtagcatcacgcgagacagtgacacacctctgtccctgatgtcggtcaaccacgaggagctggagaggtctccaagtggcttcagcatctcccaggacagagatgattatgtgttcggccccaatggggggtcgagctggatgagggagaagcggtacctcgccgagggtgagacggacacagacacggaccccttcacgcccagcggctccatgcctctgtcgtccacaggggatgggatttctgattcagtatggaccccttccaataagcccatttaaaagaggtcactggctgacccctccttgtaatgtagacagactttgtatagttcacttactcttacacccgacgcttaccagcggggacaccaatggctgcatcaaatgcatgcgtgt

SEQ ID NO: 46 - protein, 443 aa, Homo sapiens
DEGQRRTPQGIGLLAKTPLSRPVKRNNAKYRRIQTLIYDALERPRGWALLYHALVFLIVLGCLILAVLTTFKEYETVSGDWLLLLETFAIFIFGAEFALRIWAAGCCCRYKGWRGRLKFARKPLCMLDIFVLIASVPVVAVGNQGNVLATSLRSLRFLQILRMLRMDRRGGTWKLLGSAIYAHSKELITAWYIGFLTLILSSFLVYLVEKDVPEVDAQGEEMKEEFETYADALWWGLITLATIGYGDKTPKTWEGRLIAATFSLIGVSFFALPAGILGSGLALKVQEQHRQKHFEKRRKPAAELIQAAWRYYATNPNRIDLVATWRFYESVVSFPFFRKEQLEAASSQKLGLLDRVRLSNPRGSNTKGKLFTPLNVDAIEESPSKEPKPVGLNNKERFRTAFRMKAYAFWQSSEGNAFLSPSLSLPLLPPPSPLPSSPLPLPT

SEQ ID NO: 47 - DNA, 2335 bp, Homo sapiens
agccatgcgtctctgagcgccccgagcgcgcccccgccccggaccgtgcccgggccccggcgcccccagcccggcgccgcccatggccgaggcccccccgcgccgcctcggcctgggtcccccgcccggggacgccccccgcgcggagctagtggcgctcacggccgtgcagagcgaacagggcgaggcgggcgggggcggctccccgcgccgcctcggcctcctgggcagccccctgccgccgggcgcgcccctccctgggccgggctccggctcgggctccgcctgcggccagcgctcctcggccgcgcacaagcgctaccgccgcctgcagaactgggtctacaacgtgctggagcggccccgcggctgggccttcgtctaccacgtcttcatatttttgctggtcttcagctgcctggtgctgtctgtgctgtccactatccaggagcaccaggaacttgccaacgagtgtctcctcatcttggaattcgtgatgatcgtggttttcggcttggagtacatcgtccgggtctggtccgccggatgctgctgccgctaccgaggatggcagggtcgcttccgctttgccagaaagcccttctgtgtcatcgacttcatcgtgttcgtggcctcggtggccgtcatcgccgcgggtacccagggcaacatcttcgccacgtccgcgctgcgcagcatgcgcttcctgcagatcctgcgcatggtgcgcatggaccgccgcggcggcacctggaagctgctgggctcagtggtctacgcgcatagcaaggagctgatcaccgcctggtacatcgggttcctggtgctcatcttcgcctccttcctggtctacctggccgagaaggacgccaactccgacttctcctcctacgccgactcgctctggtgggggacgattacattgacaaccatcggctatggtgacaagacaccgcacacatggctgggcagggtcctggctgctggcttcgccttactgggcatctctttctttgccctgcctgccggcatcctaggctccggctttgccctgaaggtccaggagcagcaccggcagaagcacttcgagaagcggaggatgccggcagccaacctcatccaggctgcctggcgcctgtactccaccgatatgagccgggcctacctgacagccacctggtactactatgacagtatcctcccatccttcagagagctggccctcttgtttgagcacgtgcaacgggcccgcaatgggggcctacggcccctggaggtgcggcgggcgccggtacccgacggagcaccctcccgttacccgcccgttgccacctgccaccggccgggcagcacctccttctgccctggggaaagcagccggatgggcatcaaagaccgcatccgcatgggcagctcccagcggcggacgggtccttccaagcagcagctggcacctccaacaatgcccacctccccaagcagcgagcaggtgggtgaggccaccagccccaccaaggtgcaaaagagctggagcttcaatgaccgcacccgcttccgggcatctctgagactcaaaccccgcacctctgctgaggatgccccctcagaggaagtagcagaggagaagagctaccagtgtgagctcacggtggacgacatcatgcctgctgtgaagacagtcatccgctccatcaggattctcaagttcctggtggccaaaaggaaattcaaggagacactgcgaccgtacgacgtgaaggacgtcattgagcagtactcagcaggccacctggacatgctgggccggatcaagagcctgcaaactcgggtggaccaaattgtgggtcgggggcccggggacaggaaggcccgggagaagggcgacaaggggccctccgacgcggaggtggtggatgaaatcagcatgatgggacgcgtggtcaaggtggagaagcaggtgcagtccatcgagcacaagctggacctgctgttgggcttctattcgcgctgcctgcgctctggcacctcggccagcctgggcgccgtgcaagtgccgctgttcgaccccgacatcacctccgactaccacagccctgtggaccacgaggacatctccgtctccgcacagacgctcagcatctcccgctcggtcagcaccaacatggactgagggacttctcagaggcagggcagcacacggccagccccgcggcctggcgctccgactgccctctgaggcctccggactcctctcgtacttgaactcactccctcacggggagagagaccacacgcagtattgagctgcctgagtgggcgtggtacctgctgtggg

SEQ ID NO: 48 - protein, 695 aa, Homo sapiens [sequence omitted]

SEQ ID NO: 49 - DNA, 3137 bp, Homo sapiens
atgaaggatgtggagtcgggccggggcagggtgctgctgaactcggcagccgccaggggcgacggcctgctactgctgggcacccgcgcggccacgctcggtggcggcggcggtggcctgagggagagccgccggggcaagcagggggcccggatgagcctgctggggaagccgctctcttacacgagtagccagagctgccggcgcaacgtcaagtaccggcgggtgcagaactacctgtacaacgtgctggagagaccccgcggctgggcgttcatctaccacgctttcgtttttctccttgtctttggttgcttgattttgtcagtgttttctaccatccctgagcacacaaaattggcctcaagttgcctcttgatcctggagttcgtgatgattgtcgtctttggtttggagttcatcattcgaatctggtctgcgggttgctgttgtcgatatagaggatggcaaggaagactgaggtttgctcgaaagcccttctgtgttatagataccattgttcttatcgcttcaatagcagttgtttctgcaaaaactcagggtaatatttttgccacgtctgcactcagaagtctccgtttcctacagatcctccgcatggtgcgcatggaccgaaggggaggcacttggaaattactgggttcagtggtttatgctcacagcaaggaattaatcacagcttggtacataggatttttggttcttattttttcgtctttccttgtctatctggtggaaaaggatgccaataaagagttttctacatatgcagatgctctctggtggggcacaattacattgacaactattggctatggagacaaaactcccctaacttggctgggaagattgctttctgcaggctttgcactccttggcatttctttctttgcacttcctgccggcattcttggctcaggttttgcattaaaagtacaagaacaacaccgccagaaacactttgagaaaagaaggaacccagctgccaacctcattcagtgtgtttggcgtagttacgcagctgatgagaaatctgtttccattgcaacctggaagccacacttgaaggccttgcacacctgcagccctaccaagaaagaacaaggggaagcatcaagcagtcagaagctaagttttaaggagcgagtgcgcatggctagccccaggggccagagtattaagagccgacaagcctcagtaggtgacaggaggtccccaagcaccgacatcacagccgagggcagtcccaccaaagtgcagaagagctggagcttcaacgaccgaacccgcttccggccctcgctgcgcctcaaaagttctcagccaaaaccagtgatagatgctgacacagcccttggcactgatgatgtatatgatgaaaaaggatgccagtgtgatgtatcagtggaagacctcaccccaccacttaaaactgtcattcgagctatcagaattatgaaatttcatgttgcaaaacggaagtttaaggaaacattacgtccatatgatgtaaaagatgtcattgaacaatattctgctggtcatctggacatgttgtgtagaattaaaagccttcaaacacgtgttgatcaaattcttggaaaagggcaaatcacatcagataagaagagccgagagaaaataacagcagaacatgagaccacagacgatctcagtatgctcggtcgggtggtcaaggttgaaaaacaggtacagtccatagaatccaagctggactgcctactagacatctatcaacaggtccttcggaaaggctctgcctcagccctcgctttggcttcattccagatcccaccttttgaatgtgaacagacatctgactatcaaagccctgtggatagcaaagatctttcgggttccgcacaaaacagtggctgcttatccagatcaactagtgccaacatctcgagaggcctgcagttcattctgacgccaaatgagttcagtgcccagactttctacgcgcttagccctactatgcacagtcaagcaacacaggtgccaattagtcaaagcgatggctcagcagtggcagccaccaacaccattgcaaaccaaataaatacggcacccaagccagcagccccaacaactttacagatcccacctcctctcccagccatcaagcatctgcccaggccagaaactctgcaccctaaccctgcaggcttacaggaaagcatttctgacgtcaccacctgccttgttgcctccaaggaaaatgttcaggttgcacagtcaaatctcaccaaggaccgttctatgaggaaaagctttgacatgggaggagaaactctgttgtctgtctgtcccatggtgccgaaggacttgggcaaatctttgtctgtgcaaaacctgatcaggtcgaccgaggaactgaatatacaactttcagggagtgagtcaagtggctccagaggcagccaagatttttaccccaaatggagggaatccaaattgtttataactgatgaagaggtgggtcccgaagagacagagacagacacttttgatgccgcaccgcagcctgccagggaagctgcctttgcatcagactctctaaggactggaaggtcacgatcatctcagagcatttgtaaggcaggagaaagtacagatgccctcagcttgcctcatgtcaaactgaaataagttcttcattttctttccaggcatagcagttctttagccatacatatcattgcatgaactatttcgaaagcccttctaaaaagttgaaattgcaagaatcgggaagaacatgaaaggcagtttataagcccgttaccttttaattgcatgaaaatgcatgtttagggatggctaaaattccaaggtgcatcgacattaacccactcatttagtaatgtaccttgagttaaaaagcctgagaaaccaaacacagctaatgctatggggtgtatgaatatgtcaagtttaggtcatttagaagatttgacactgtattttgaaattatgggagtaaacaccttcaaatttcaggcatttctgctttgtgactaaatacaaactacattttcaagattaggccataatgtatatttaaacacaatggctatcaacagctgctaata

SEQ ID NO: 50 - protein, 897 aa, Homo sapiens
MKDVESGRGRVLLNSAAARGDGLLLLGTRAATLGGGGGGLRESRRGKQGARMSLLGKPLSYTSSQSCRRNVKYRRVQNYLYNVLERPRGWAFIYHAFVFLLVFGCLILSVFSTIPEHTKLASSCLLILEFVMIVVFGLEFIIRIWSAGCCCRYRGWQGRLRFARKPFCVIDTIVLIASIAVVSAKTQGNIFATSALRSLRFLQILRMVRMDRRGGTWKLLGSVVYAHSKELITAWYIGFLVLIFSSFLVYLVEKDANKEFSTYADALWWGTITLTTIGYGDKTPLTWLGRLLSAGFALLGISFFALPAGILGSGFALKVQEQHRQKHFEKRRNPAANLIQCVWRSYAADEKSVSIATWKPHLKALHTCSPTKKEQGEASSSQKLSFKERVRMASPRGQSIKSRQASVGDRRSPSTDITAEGSPTKVQKSWSFNDRTRFRPSLRLKSSQPKPVIDADTALGTDDVYDEKGCQCDVSVEDLTPPLKTVIRAIRIMKFHVAKRKFKETLRPYDVKDVIEQYSAGHLDMLCRIKSLQTRVDQILGKGQITSDKKSREKITAEHETTDDLSMLGRVVKVEKQVQSIESKLDCLLDIYQQVLRKGSASALALASFQIPPFECEQTSDYQSPVDSKDLSGSAQNSGCLSRSTSANISRGLQFILTPNEFSAQTFYALSPTMHSQATQVPISQSDGSAVAATNTIANQINTAPKPAAPTTLQIPPPLPAIKHLPRPETLHPNPAGLQESISDVTTCLVASKENVQVAQSNLTKDRSMRKSFDMGGETLLSVCPMVPKDLGKSLSVQNLIRSTEELNIQLSGSESSGSRGSQDFYPKWRESKLFITDEEVGPEETETDTFDAAPQPAREAAFASDSLRTGRSRSSQSICKAGESTDALSLPHVKLK

SEQ ID NO: 51 - DNA, 3102 bp, Homo sapiens
gaagagggcgcgagggtagcagccagagggagccgccagccctgcctgcggatccccgccgggcgcatggggcgcttcgagccgggactgcgtgcgggccccgaggccagtttcctgctgtcgtaagaagccgcgccaggacgcccgccggaccccgagctgctgggaggatgaccatggctgggggcaggaggggactagtggcccctcaaaacacgtttctggagaatattgttcggcggtccaatgatactaattttgtgttggggaatgctcagatagtggactggcctattgtgtacagcaatgatggattttgcaagctgtctggctatcacagggcagaagtgatgcaaaaaagcagcacctgcagttttatgtatggggagctgactgataaagacacgattgaaaaagtgcggcaaacatttgagaactatgagatgaattcctttgaaattctgatgtacaagaagaacaggacacctgtgtggttctttgtgaaaattgctccaattcgaaacgaacaggataaagtggttttatttctttgcactttcagtgacataacagctttcaaacagccaattgaggatgattcatgtaaaggctgggggaagtttgctcggctgacaagagcactgacaagcagcaggggtgtcctgcagcagctggctccaagcgtgcaaaaaggcgagaatgtccacaagcactcccgcctggcagaggtcctacagctgggctcagacatccttccccagtacaagcaagaggcaccaaagactccccctcacatcatcttacattattgtgtttttaagaccacgtgggattggatcatcttgatcttgaccttctatacagccatcttggtcccttataatgtctccttcaaaaccaggcagaataatgtggcctggctggttgttgatagcatcgtggatgttatctttttggtggacattgtgctcaattttcataccacctttgttggaccagcaggggaggtgatttctgaccccaaacttatccgcatgaactacctgaagacgtggtttgtgattgaccttctgtcctgtttgccatatgatgtcatcaacgcttttgagaacgtggatgagggcatcagcagcctgttcagctctctaaaagttgtccggctgctccgtcttgggcgagtggcccgtaagctggaccactacattgaatatggagctgctgtgctggtcctgctggtgtgtgtgtttgggctggctgcacactggatggcctgcatctggtacagcattggggactatgagatctttgacgaggacaccaagacaatccgcaacaacagctggctgtaccaactagcgatggacattggcaccccttaccagtttaatgggtctggctcagggaagtgggaaggtggtcccagcaagaattctgtctacatctcctcgttgtatttcacaatgaccagcctcaccagtgtgggctttgggaacatcgccccatccacagacattgagaagatctttgcagtggccatcatgatgattggctcacttctctatgccaccatcttcgggaatgtgacgactattttccaacagatgtatgccaacaccaacagataccatgagatgctcaacagtgttcgggacttcctgaagctctaccaggtgccaaaaggattgagtgagcgagtaatggattatattgtgtccacttggtccatgtccagaggcattgacacagagaaggtcctgcagatctgccccaaggacatgagagccgacatctgcgtgcacctgaaccgcaaggtgttcaaggagcacccggccttccggctggccagtgatggctgcctccgggcactggccatggagttccagacggtgcactgtgccccaggggacctcatctaccatgcaggagagagcgttgacagcctctgctttgtggtttctggctccctggaggtgatccaagatgatgaggtggtggccattctaggaaaaggagacgtgtttggagatgtgttctggaaggaagccacccttgcccagtcctgtgccaatgttagggccttgacctactgtgatctgcatgtgatcaagcgggatgccctgcagaaagtgctggaattctacacggccttctcccattccttctcccggaacctgattctgacgtacaacttgaggaagaggattgtgttccggaagatcagcgacgtgaaacgtgaagaggaagaacgcatgaaacgaaagaatgaggcccccctgatcttgcccccggaccaccctgtccggcgcctcttccagagattccgacagcagaaagaggccaggctggcagctgagagagggggccgggacctggatgacctagatgtggagaagggcaatgtccttacagagcatgcctccgccaaccacagcctcgtgaaggccagcgtggtcaccgtgcgtgagagtcctgccacgcccgtatccttccaggcagcctccacctccggggtgccagaccacgcaaagctacaggcgccagggtccgagtgcctgggccccaaggggggcgggggcgattgtgccaagcgcaaaagctgggcccgcttcaaagatgcttgcgggaagagtgaggactggaacaaggtgtccaaggctgagtcgatggagacacttcccgagaggacaaaagcatcaggcgaggccacactgaagaagacagactcgtgtgacagtggcatcaccaagagcgacttgcgcctggacaacgtgggtgaggccaggagtccccaggatcggagtcccatcctggcagaggtcaagcattcgttctaccccatccctgagcagacgctgcaggccacagtcctggaggtgaggcacgagctgaaggaggacatcaaggccttaaacgccaaaatgaccaatattgagaaacagctctctgagatactcaggatattaacttccagaagatcctctcagtctcctcaggagttgtttgaaatatcgaggccacagtccccagaatcagagagagacatttttggagccagctgagaggtctatttaaaaaaaaagtcagagacagatacctacaacc

SEQ ID NO: 52 - protein, 962 aa, Homo sapiens
MTMAGGRRGLVAPQNTFLENIVRRSNDTNFVLGNAQIVDWPIVYSNDGFCKLSGYHRAEVMQKSSTCSFMYGELTDKDTIEKVRQTFENYEMNSFEILMYKKNRTPVWFFVKIAPIRNEQDKVVLFLCTFSDITAFKQPIEDDSCKGWGKFARLTRALTSSRGVLQQLAPSVQKGENVHKHSRLAEVLQLGSDILPQYKQEAPKTPPHIILHYCVFKTTWDWIILILTFYTAILVPYNVSFKTRQNNVAWLVVDSIVDVIFLVDIVLNFHTTFVGPAGEVISDPKLIRMNYLKTWFVIDLLSCLPYDVINAFENVDEGISSLFSSLKVVRLLRLGRVARKLDHYIEYGAAVLVLLVCVFGLAAHWMACIWYSIGDYEIFDEDTKTIRNNSWLYQLAMDIGTPYQFNGSGSGKWEGGPSKNSVYISSLYFTMTSLTSVGFGNIAPSTDIEKIFAVAIMMIGSLLYATIFGNVTTIFQQMYANTNRYHEMLNSVRDFLKLYQVPKGLSERVMDYIVSTWSMSRGIDTEKVLQICPKDMRADICVHLNRKVFKEHPAFRLASDGCLRALAMEFQTVHCAPGDLIYHAGESVDSLCFVVSGSLEVIQDDEVVAILGKGDVFGDVFWKEATLAQSCANVRALTYCDLHVIKRDALQKVLEFYTAFSHSFSRNLILTYNLRKRIVFRKISDVKREEEERMKRKNEAPLILPPDHPVRRLFQRFRQQKEARLAAERGGRDLDDLDVEKGNVLTEHASANHSLVKASVVTVRESPATPVSFQAASTSGVPDHAKLQAPGSECLGPKGGGGDCAKRKSWARFKDACGKSEDWNKVSKAESMETLPERTKASGEATLKKTDSCDSGITKSDLRLDNVGEARSPQDRSPILAEVKHSFYPIPEQTLQATVLEVRHELKEDIKALNAKMTNIEKQLSEILRILTSRRSSQSPQELFEISRPQSPESERDIFGAS

SEQ ID NO: 53 - DNA, 4381 bp, Homo sapiens
cctcatctccatcaccaccttctgcctggaaacccatgagggcttcatccatattagcaacaagacggtgacccaggcctccccgatccccggggcacctccggagaacatcaccaacgtggaggtggagacggagcccttcctgacctacgtggagggggtgtgcgtggtctggttcaccttcgagttcctcatgcgcatcaccttctgcccagacaaggtggagtttcttaaaagcagcctcaacatcatcgactgtgtggccatcctgcccttctatctcgaggtgggcctctcgggcctcagctccaaggccgccaaagacgtgctgggcttcctgcgggtggtccgcttcgtccgcatcctgcgcatcttcaagctgacccggcacttcgtggggctgcgcgtgctgggacacacgctccgcgccagcaccaacgagttcctgctgctcatcatcttcctggccctgggggtgctcatcttcgccaccatgatttactacgctgagcgcattggcgccgaccccgatgacatcctgggctccaaccacacctacttcaagaacatccccattggcttctggtgggctgtggtcaccatgacgaccctgggctatggagacatgtaccccaagacgtggtcggggatgctggtcggggcgctgtgtgccctggcgggggtgctgaccatcgccatgcctgtgcccgtcattgtcaacaactttggcatgtactattcgctggccatggccaagcagaagctgcccaagaagaagaacaaacacatcccccggcccccgcaaccgggctcgcccaactactgcaagcctgacccacccccgccacccccgccccacccgcaccacggcagcgggggcatcagcccgccgccacccatcaccccaccctccatgggggtgactgtggccggggcctacccagcggggccccacacgcaccccgggctgctcagggggggagcgggtgggctggggatcatggggctgcctcctctgccagcccccggcgagccttgcccgttggctcaggaggaggtgattgagatcaaccgggcagatcctcgccccaatggggatccggcagcagctgcgcttgcccacgaggactgcccagccattgaccagcctgccatgtccccggaagacaagagccccatcacgcctggaagccgtggccgctatagccgggaccgagcctgcttcctcctcaccgactatgccccttcccctgatggctccatccgaaaagctcttgtcaccgcctgagacctcgcgagactttcggtcccccccgccccttccccccaggttacgagaaatcccgcagcctcagcagcatcgcgggcctgagcggggtgtccctgcgcctcgcgccccttgccaccccccctggctctccccgggccgcccgccgcgctcccccgaccctgccctccatcctttagcgctcccctcccccctgtggggggactcgggggtgaccgggaagaaggtcaaaggagctgggggtggggggtggggaaaagggtttttttaaaaaaaatcaaaaagtcattaataatatgcaaccgagatgacgatgccagcagacacccccgggcccctcacccccaacctgggcccccaggatggagagaggggccacagcccgtccccccaactcttccctccccaaaaaaagccttctcaggtctccacgagccataggacatccccctgccatcaacttgtgtaaataagtccaaattatgccagttacatcttggggcacctccccccacacactgcatgccttccctaacctggagcccccactccaagtccacctcagcaataagccgccaggggccgcatgcgcgggtttgaggggcaggcactctgggaagggggtggcacctcccgggggtcgggctggcctttaaggtctccagccttcccatccttcaccccaggaggacaaccaaccctgtgcgttgattaggagaaaacaaaccagaaactagaaacagtgtaggggaaggaggaacagttacccaagccccagatcggagttgagctcaggtggcgggagggcggggccgagttgagctcaggtggtgggagggcggggcgggctttggacctgctccctcagcctttaggagaattcctctggtgaatttcaccctctcatccgccccttcccccagggacctgctcgcctctattcttgctgcatggactcagacctcctatcccagaattcctgggatgatctggccctagcacacgaaattccccgactatctccctccattcccaggacatgagacctgcacccagaattctgagactgaccctggcacgccacatctcccaatccccacacactcctgcgacttaacctctgcacacagaggctccctgaaccaccctccctccccactcctgccaccccaaacacccccaccaaattccctgaactgcgtcccagcacttctcaaacctccaagacttgacccagctcttttcagctcaaattcagcctttgggatgctccaaatccttcccacaactgacatttcttggacacccccaaagcctcaggcctgttccgcacccatatccccaaagccctaacagacttgtccagcccaggttcccttgatgctagaacttccaagataggcgcaacctgtctgcaattccagggaaccagaccctccccaagcaccctctttgtcttacgcctaaccctgagtcccttccctgagatggtgccccaaaggtaccctcttcacagacaccagtgtttcccagagggttgtatttgtacctttggtggtgtgctaaggtttgaggcagtatgaggacaaacacttgttttaaaagtgttgtctctaatacgcattttgtacagaagccgataagtgcaggcatcgctgcttggctaggacacggtttatttaggttaagagtgtttccatttaaagtagtccacagatgatcacagaggctgttcccgaagggaggaacactggagtatcagaagattgggaaccgacaacacccagctcggctgggatcccagccccccttccccagcggtcctcaccgcgtcacgctcgcgggtggaaaatcatttcccacctcctatcctggctcaaggatgcgctacctcccccaagcccagagaccacaccggtcccagactctttagcggaccccccttttggagccggggtcccacggaattagccacctccctccctctgctcccacggcctcaggaaccccccacccgagggtggatggggggcgtcactgagcacgattctcgatgcaacgattcctatgcaaggggcattttgagtcccccccatccttccctcggaccctaaaccctggtgaagcaggggtgaggggtggggcgggttttggtgggggcggggcaaagggctaggggctccagacaccagggtacggggtggggactgattatattgccaaagggttcaacttctttaacaagcccccccgtttcccctgaccttcacgaaagccgaaggaggcggggaaagggggtgagggtcttttccaaagggtactgacctcttcccaacgtctccccctgctcgccagtccgccacacgtacccagcttttgagttcagcttttcaaaataaccacaatcatgataaacttctacaaaacgtgattctcctcccctcccaccccatcccccaagtcaatagtgtgggattcggggagggagagagcgagctaaagggactctttccaagtccggctcccccttttccccccggccgccagggtgcctgcacctacacgcatgcgctgcatgacgcgccccccacacgcatgtcgcacccctcctgcgctccgggaacgcacggacacgggccagggggcggggcgattggggaggaatgaatggcggggggtcttcctgagctccgcggctcaccctccccaacacacacacacacacacacacagagcaataagtttctctcactcaaatgtgggcggggcgggcctagcctgtcgctggtggggggagtggtgagggggcgctctcagggatgggggcggggttcggagacagtgtggggaggggaggtctgcaaatcgtccaactctggtgctaatggcgggtcttctcagcccacccgcagggcagggagggaggggtcggcgtggccccttccccaagcctcccccacgcccaccctgggtgcatgaaccgcccaatgcagaagctgccgcatgtcacccccctctccccaaagaaaaagtgtcatgcccccttcccacccaccctcactccccaccaaaataaacgtttccttttcattt

SEQ ID NO: 54 - protein, 428 aa, Homo sapiens
LISITTFCLETHEGFIHISNKTVTQASPIPGAPPENITNVEVETEPFLTYVEGVCVVWFTFEFLMRITFCPDKVEFLKSSLNIIDCVAILPFYLEVGLSGLSSKAAKDVLGFLRVVRFVRILRIFKLTRHFVGLRVLGHTLRASTNEFLLLIIFLALGVLIFATMIYYAERIGADPDDILGSNHTYFKNIPIGFWWAVVTMTTLGYGDMYPKTWSGMLVGALCALAGVLTIAMPVPVIVNNFGMYYSLAMAKQKLPKKKNKHIPRPPQPGSPNYCKPDPPPPPPPHPHHGSGGISPPPPITPPSMGVTVAGAYPAGPHTHPGLLRGGAGGLGIMGLPPLPAPGEPCPLAQEEVIEINRADPRPNGDPAAAALAHEDCPAIDQPAMSPEDKSPITPGSRGRYSRDRACFLLTDYAPSPDGSIRKALVTA

SEQ ID NO: 55 - DNA, 1855 bp, Homo sapiens
gggaagggtgtttggagggcagcggccgccccaagccggagccccgcagcgcttcttatgatcagctcggtgtgtgtctcctcctaccgcgggcgcaagtcggggaacaagcctccgtccaaaacatgtctgaaggaggagatggccaagggcgaggcgtcggagaagatcatcatcaacgtgggcggcacgcgacatgagacctaccgcagcaccctgcgcaccctaccgggaacccgcctcgcctggctggccgaccccgacggcgggggccggcccgagaccgatggcggcggtgtgggtagcagcggcagcagcggcggcgggggctgcgagttcttcttcgacaggcacccgggcgtcttcgcctacgtgctcaactactaccgcaccggcaagctgcactgccccgcggacgtgtgcgggccgctcttcgaagaggagctcaccttctggggcatcgacgagaccgacgtggaaccctgctgctggatgacctaccggcagcaccgcgacgccgaggaggcgctcgacatcttcgagagcccggacggaggcggcagcggcgcggggcccagcgacgaggccggcgacgatgagcgggagctggccctgcagcgactgggcccccacgagggaggcgcgggccatggcgccgggtctgggggctgccgcggctggcagccccgcatgtgggcgctcttcgaggatccctactcctcccgggccgctagggtagtggcctttgcctctctcttcttcatcctggtctccatcaccactttctgcctggagacccatgaggcctttaatatcgaccgcaacgtgacagagatcctccgcgtagggaacatcaccagcgtgcacttccggcgggaggtagagacagagcccatcctgacctacatcgagggcgtatgtgtgctgtggttcacactggagttcctggtgcgcatcgtgtgctgccccgacacgctggacttcgtcaagaacctgctcaacatcatcgactttgtggccatcctgcccttctacctggaggtggggctgagcggcctgtcatccaaggcggcccgcgacgtgctgggcttcctgcgcgtggtgcgcttcgtgcgcatcctgcgtatcttcaagctcacacgccacttcgtggggctacgcgtgctgggccacaccctgagggccagcaccaatgagttcctgctgcttatcatcttcctggccctgggtgtgctcatctttgccaccatgatctactacgctgagcgcattggggccaggccctccgaccctcggggtaatgaccacaccgacttcaagaacatccccattggcttctggtgggctgtggtcaccatgacgacactgggctacggagacatgtaccccaagacgtggtcaggcatgctggtaggggcactgtgtgcactggctggcgtgctcaccatcgccatgccggtgcctgtcatcgtcaacaacttcggcatgtactactccctggccatggccaagcagaagctgcccaagaaacggaagaagcacgtgccacggccggcgcagctggagtcacccatgtactgcaagtctgaggagacttccccccgggacagcacctgcagtgataccagcccccctgcccgggaagagggtatgatcgagaggaaacgggcaggtgagattaggggttgggaaggaaaatcccttttcccccagtggcctagggagtttccaaatggacctcagaccttgggatttggcatgtgttttgtgtggggcttccctaagcataaagatgtgcctttatgagggcaaagtgttgaggccgaatttctctgtcctctggctgggtctccga

SEQ ID NO: 56 - protein, 582 aa, Homo sapiens
MISSVCVSSYRGRKSGNKPPSKTCLKEEMAKGEASEKIIINVGGTRHETYRSTLRTLPGTRLAWLADPDGGGRPETDGGGVGSSGSSGGGGCEFFFDRHPGVFAYVLNYYRTGKLHCPADVCGPLFEEELTFWGIDETDVEPCCWMTYRQHRDAEEALDIFESPDGGGSGAGPSDEAGDDERELALQRLGPHEGGAGHGAGSGGCRGWQPRMWALFEDPYSSRAARVVAFASLFFILVSITTFCLETHEAFNIDRNVTEILRVGNITSVHFRREVETEPILTYIEGVCVLWFTLEFLVRIVCCPDTLDFVKNLLNIIDFVAILPFYLEVGLSGLSSKAARDVLGFLRVVRFVRILRIFKLTRHFVGLRVLGHTLRASTNEFLLLIIFLALGVLIFATMIYYAERIGARPSDPRGNDHTDFKNIPIGFWWAVVTMTTLGYGDMYPKTWSGMLVGALCALAGVLTIAMPVPVIVNNFGMYYSLAMAKQKLPKKRKKHVPRPAQLESPMYCKSEETSPRDSTCSDTSPPAREEGMIERKRAGEIRGWEGKSLFPQWPREFPNGPQTLGFGMCFVWGFPKHKDVPL

SEQ ID NO: 57 - DNA, 2646 bp, Homo sapiens
ctcctaaacgccaccctcactaagtctccctgggcttggggagtggcacgatggcggcaggcctggccacgtggctgccttttgctcgggcagcagcagtgggctggctgcccctggcccagcaacccctgcccccggcaccgggggtgaaggcatctcgaggagatgaggttctggtggtgaacgtgagcggacggcgctttgagacttggaagaatacgctggaccgctacccagacaccttgctgggcagctcggagaaggaattcttctacgatgctgactcaggcgagtacttcttcgatcgcgaccctgacatgttccgccatgtgctgaacttctaccgaacggggcggctgcattgcccacggcaggagtgcatccaggccttcgacgaagagctggctttctacggcctggttcccgagctagtcggtgactgctgccttgaagagtatcgggaccgaaagaaggagaatgccgagcgcctggcagaggatgaggaggcagagcaggccggggacggcccagccctgccagcaggcagctccctgcggcagcggctctggcgggccttcgagaatccacacacgagcaccgcagccctcgttttctactatgtgaccggcttcttcatcgccgtgtcggtcatcgccaatgtggtggagaccatcccatgccgcggctctgcacgcaggtcctcaagggagcagccctgtggcgaacgcttcccacaggcctttttctgcatggacacagcctgtgtactcatattcacaggtgaatacctcctgcggctgtttgccgcccccagccgttgccgcttcctgcggagtgtcatgagcctcatcgacgtggtggccatcctgccctactacattgggcttttggtgcccaagaacgacgatgtctctggcgcctttgtcaccctgcgtgtgttccgggtgtttcgcatcttcaagttctccaggcactcacagggcttgaggattctgggctacacactcaagagctgtgcctctgagctgggctttctcctcttttccctaaccatggccatcatcatctttgccactgtcatgttttatgctgagaagggcacaaacaagaccaactttacaagcatccctgcggccttctggtataccattgtcaccatgaccacgcttggctacggagacatggtgcccagcaccattgctggcaagattttcgggtccatctgctcactcagtggcgtcttggtcattgccctgcctgtgccagtcattgtgtccaactttagccgcatctaccaccagaaccagcgggctgacaagcgccgagcacagcagaaggtgcgcttggcaaggatccggttggcaaagagtggtaccaccaatgccttcctgcagtacaagcagaatgggggccttgaggacagcggcagtggcgaggaacaggctctttgtgtcaggaaccgttctgcctttgaacagcaacatcaccacttgctgcactgtctagagaagacaacgtgccatgagttcacagatgagctcaccttcagtgaagccctgggagccgtctcgccgggtggccgcaccagccgtagcacctctgtgtcttcccagccagtgggacccggaagcctgctgtcttcttgctgccctcgcagggccaagcgccgcgccatccgccttgccaactccactgcctcagtcagccgtggcagcatgcaggagctggacatgctggcagggctgcgcaggagccatgcccctcagagccgctccagcctcaatgccaagccccatgacagccttgacctgaactgcgacagccgggacttcgtggctgccattatcagcatccctacccctcctgccaacaccccagatgagagccaaccttcctcccctggcggcggtggcagggccggcagcaccctcaggaactccagcctgggtaccccttgcctcttccccgagactgtcaagatctcatccctgtgaggggtaggcctgctgattcagagggtcctcttcatttttgggaactcctttccaaagccatatttttgggaggcagagaggggcaggcttgggcaccccttctgccccccccactgagaactatgcaatggagtttcatgaaatggtccacatagtggggaagtagccaggaaatgagaaacttcctcccaccccagacatttttcctggtgggagctgaagcactgggcttccacaggcccctggcctccttgccctagcacactgggactggccccactctcccagctggactcctgcatgctcctccccttgggctctcagatgaaggcaaagctttgatccgacatctgagctctagcctaagaaggagagttgagatttcctcctccctctggctgggatatggagctttggaggttcagagaagagaaccctcacctctgatctggcctctacgagaggtcctcatctccatctggcccaacaattcccagattctgaagcttggaatgcaaacacaggcttcatgggctgtggcctctgcagcgacctgccatccccaggccttgcctgaggggtcaggctgcctctcccaacacacactcagatagcacaaattctaccatccccttccctggctgctggaaat

SEQ ID NO: 58 - protein, 647 aa, Homo sapiens
MAAGLATWLPFARAAAVGWLPLAQQPLPPAPGVKASRGDEVLVVNVSGRRFETWKNTLDRYPDTLLGSSEKEFFYDADSGEYFFDRDPDMFRHVLNFYRTGRLHCPRQECIQAFDEELAFYGLVPELVGDCCLEEYRDRKKENAERLAEDEEAEQAGDGPALPAGSSLRQRLWRAFENPHTSTAALVFYYVTGFFIAVSVIANVVETIPCRGSARRSSREQPCGERFPQAFFCMDTACVLIFTGEYLLRLFAAPSRCRFLRSVMSLIDVVAILPYYIGLLVPKNDDVSGAFVTLRVFRVFRIFKFSRHSQGLRILGYTLKSCASELGFLLFSLTMAIIIFATVMFYAEKGTNKTNFTSIPAAFWYTIVTMTTLGYGDMVPSTIAGKIFGSICSLSGVLVIALPVPVIVSNFSRIYHQNQRADKRRAQQKVRLARIRLAKSGTTNAFLQYKQNGGLEDSGSGEEQALCVRNRSAFEQQHHHLLHCLEKTTCHEFTDELTFSEALGAVSPGGRTSRSTSVSSQPVGPGSLLSSCCPRRAKRRAIRLANSTASVSRGSMQELDMLAGLRRSHAPQSRSSLNAKPHDSLDLNCDSRDFVAAIISIPTPPANTPDESQPSSPGGGGRAGSTLRNSSLGTPCLFPETVKISSL

SEQ ID NO: 59 - DNA, 2351 bp, Homo sapiens
gaattctattgggtgactctcgttcgtcttctctatcctacactccacatactgaccctatattatccagactgtgccggggagaaatcaaaaacacctgtttgaagaaacggctgcacctgtgtgcttatttgtgccagagggtggcctagcccacctgcaggaagagatttggctgggttctgttgagggtgattgttaggacgttgtattttgttgccattattccaaatacctgtcttggagggaaagttgcccttctgagaactgtgactttaccaggagccctatcttggaataagagttacacctctggaccacgtttctcactagtactttgcttgactggaggaagtgggtgacttttggctgcttcggtgacccattgtagacgcctcgttacccttcttccttccgcttcaagtaatcatggcggcgggggtggcagcgtggctgccttttgcaagggcagcggctatcgggtggatgcctgtggcctcggggcctatgccggctcccccgaggcaggagaggaaaaggacccaagatgctctcattgtgctgaatgtgagtggcacccgcttccagacgtggcaggacaccctggaacgttacccagacactctactgggcagttctgagagggactttttctaccacccagaaactcagcagtatttctttgaccgtgacccagacatcttccgccacatcctgaatttctaccgcactgggaagctccactatcctcgccacgagtgcatctctgcttacgatgaagaactggccttctttggcctcatcccggaaatcatcggcgactgctgttatgaggagtacaaggatcgcaggcgagagaacgccgagcgcctgcaggacgacgcggataccgacaccgctggggagagcgccttgcccaccatgactgcaaggcagagggtctggagggccttcgagaacccccacaccagcacgatggccctggtgttctactatgtcacggggtttttcattgccgtctctgtcatcgcgaatgtggtggaaacagtgccgtgcggatcaagcccaggtcacattaaagaactgccctgtggagagcggtatgctgtggccttcttctgcttggacacggcctgcgtcatgatcttcacagttgagtatttgcttcgcctggctgcagcgcctagtcgttaccgttttgtgcgtagtgtcatgagtatcatcgacgtggtggccatcctgccttattacattgggctggtgatgacagacaatgaggacgtcagcggagcctttgtcacactccgagtcttccgggtcttcaggatctttaagttttcccgccactctcaaggcctgcgcatcctggggtacacactgaagagttgtgcctcagaattgggcttcttgcttttctcgctcaccatggctatcatcatcttcgctacagttatgttctacgcagagaaggggtcttcggctagcaagttcaccagcatccctgcagccttctggtataccatcgtcaccatgacaacactagggtatggtgacatggtgccaaaaaccatagcagggaagatttttggttctatctgttcgctgagtggggtcttggtcattgctctacctgttccggtgattgtatccaacttcagtcgcatctaccaccagaatcaacgagcagacaaacgaagggcacaaaagaaagctagactggccaggatccgggcagccaaaagcggaagcgcaaatgcttacatgcagagcaaacggaatggtttactcagtaatcagctgcagtcctcagaggatgagcaggcttttgttagcaaatccggctccagctttgaaacccagcaccaccacctgcttcactgcctggaaaaaaccacgaatcacgagtttgtggacgaacaagtctttgaagaaagctgcatggaagttgcaactgttaatcgtccttcaagtcacagtccttcactgtcttcacaacaaggagtcaccagcacctgctgttcacgacgacacaaaaaaacttttcgcatcccaaatgccaatgtatcaggaagccatcaaggtagtatacaagaactcagcacgattcagatcagatgtgtggagagaacacctctgtctaacagccgatccagtttaaatgccaaaatggaagagtgtgttaaactaaactgtgaacaaccttatgtgactacagcaataataagcatcccaacacctccagtaaccacaccagaaggagacgataggccagaatcccctgagtactcaggaggaaatattgtcagagtttctgctttgtaagacaattggaataaggtctaagagaattc

SEQ ID NO: 60 - protein, 630 aa, Homo sapiens
MAAGVAAWLPFARAAAIGWMPVASGPMPAPPRQERKRTQDALIVLNVSGTRFQTWQDTLERYPDTLLGSSERDFFYHPETQQYFFDRDPDIFRHILNFYRTGKLHYPRHECISAYDEELAFFGLIPEIIGDCCYEEYKDRRRENAERLQDDADTDTAGESALPTMTARQRVWRAFENPHTSTMALVFYYVTGFFIAVSVIANVVETVPCGSSPGHIKELPCGERYAVAFFCLDTACVMIFTVEYLLRLAAAPSRYRFVRSVMSIIDVVAILPYYIGLVMTDNEDVSGAFVTLRVFRVFRIFKFSRHSQGLRILGYTLKSCASELGFLLFSLTMAIIIFATVMFYAEKGSSASKFTSIPAAFWYTIVTMTTLGYGDMVPKTIAGKIFGSICSLSGVLVIALPVPVIVSNFSRIYHQNQRADKRRAQKKARLARIRAAKSGSANAYMQSKRNGLLSNQLQSSEDEQAFVSKSGSSFETQHHHLLHCLEKTTNHEFVDEQVFEESCMEVATVNRPSSHSPSLSSQQGVTSTCCSRRHKKTFRIPNANVSGSHQGSIQELSTIQIRCVERTPLSNSRSSLNAKMEECVKLNCEQPYVTTAIISIPTPPVTTPEGDDRPESPEYSGGNIVRVSAL

SEQ ID NO: 61 - DNA, 1968 bp, Homo sapiens
atggcggccggagttgcggcctggctgccttttgcccgggctgcggccatcgggtggatgccggtggccaactgccccatgcccctggccccggccgacaagaacaagcggcaggatgagctgattgtcctcaacgtgagtgggcggaggttccagacctggaggaccacgctggagcgctacccggacaccctgctgggcagcacggagaaggagttcttcttcaacgaggacaccaaggagtacttcttcgaccgggaccccgaggtgttccgctgcgtgctcaacttctaccgcacggggaagctgcactacccgcgctacgagtgcatctctgcctacgacgacgagctggccttctacggcatcctcccggagatcatcggggactgctgctacgaggagtacaaggaccgcaagagggagaacgccgagcggctcatggacgacaacgactcggagaacaaccaggagtccatgccctcgctcagcttccgccagaccatgtggcgggccttcgagaacccccacaccagcacgctggccctggtcttctactacgtgactggcttcttcatcgctgtctcggtcatcaccaacgtggtggagacggtgccgtgcggcacggtcccgggcagcaaggagctgccgtgcggggagcgctactcggtggccttcttctgcctggacacggcgtgcgtcatgatcttcaccggggagtacctcctgcggctcttcgcggctcccagccgctaccgcttcatccgcagcgtcatgagcatcatcgacgtggtggccatcatgccctactacatcggtctggtcatgaccaacaacgaggacgtgtccggcgccttcgtcacgctccgggtcttccgcgtcttcaggatcttcaagttttcccgccactcccagggcctgcggatcctgggctacacactgaagagctgtgcctccgaactgggctttcttctcttctccctcaccatggccatcatcatctttgccactgtgatgttttatgccgagaagggctcctcggccagcaagttcacaagcatccctgcctcgttttggtacaccattgtcaccatgaccacactggggtacggagacatggtgcttaagacgattgcagggaagatcttcggctccatctgctccttgagtggcgtcctggtcattgccctgccagtccctgtgattgtttccaactttagccggatttaccaccagaatcagagagctgataaacgcagggcacaaaagaaggcccgccttgccaggatccgtgtggccaaaacaggcagttcgaatgcatacctgcacagcaagcgcaacgggctcctcaacgaggcgctggagctgacgggcaccccagaagaggagcacatgggcaagaccacctcactcatcgagagccagcatcatcacctgctgcactgcctggaaaaaaccactgggttgtcctatcttgtggatgatcccctgttatctgtacgaacctccaccatcaagaaccacgagtttattgatgagcagatgtttgagcagaactgcatggagagttcaatgcagaactacccatccacaagaagtccctcactgtccagccacccaggcctcactaccacctgctgctcccgtcgtagtaagaagaccacacacctgcccaattctaacctgccagctactcgcctgcgcagcatgcaagagctcagcacgatccacatccagggcagtgagcagccctccctcacaaccagtcgctccagccttaatttgaaagcagacgacggactgagaccaaactgcaaaacatcccagatcaccacagccatcatcagcatccccactcccccagcgctaaccccagagggggaaagtcggccaccccctgccagcccaggccccaacacgaacattccttccataaccagcaatgttgtcaaggtctctgtcttgtaa

SEQ ID NO: 62 - protein, 655 aa, Homo sapiens
MAAGVAAWLPFARAAAIGWMPVANCPMPLAPADKNKRQDELIVLNVSGRRFQTWRTTLERYPDTLLGSTEKEFFFNEDTKEYFFDRDPEVFRCVLNFYRTGKLHYPRYECISAYDDELAFYGILPEIIGDCCYEEYKDRKRENAERLMDDNDSENNQESMPSLSFRQTMWRAFENPHTSTLALVFYYVTGFFIAVSVITNVVETVPCGTVPGSKELPCGERYSVAFFCLDTACVMIFTGEYLLRLFAAPSRYRFIRSVMSIIDVVAIMPYYIGLVMTNNEDVSGAFVTLRVFRVFRIFKFSRHSQGLRILGYTLKSCASELGFLLFSLTMAIIIFATVMFYAEKGSSASKFTSIPASFWYTIVTMTTLGYGDMVLKTIAGKIFGSICSLSGVLVIALPVPVIVSNFSRIYHQNQRADKRRAQKKARLARIRVAKTGSSNAYLHSKRNGLLNEALELTGTPEEEHMGKTTSLIESQHHHLLHCLEKTTGLSYLVDDPLLSVRTSTIKNHEFIDEQMFEQNCMESSMQNYPSTRSPSLSSHPGLTTTCCSRRSKKTTHLPNSNLPATRLRSMQELSTIHIQGSEQPSLTTSRSSLNLKADDGLRPNCKTSQITTAIISIPTPPALTPEGESRPPPASPGPNTNIPSITSNVVKVSVL

SEQ ID NO: 63 - DNA, 4070 bp, Homo sapiens
acgcggcctgctcaggcctccagcggccggtcggaggggaggcgggaggcgagcgaggacccgcgcccgcagtccagtctgtgcgcgcccgtgctcgcttggcgcggtgcgggaccagcgccggccacccgaagcctagtgcgtcgccgggtgggtgggcccgcccggcgccatgggctcaggatgccggtgcggaggggccacgtcgcgccgcagaacaccttcctggacaccatcatccgcaagtttgagggccagagccgtaagttcatcatcgccaacgctcgggtggagaactgcgccgtcatctactgcaacgacggcttctgcgagctgtgcggctactcgcgggccgaggtgatgcagcgaccctgcacctgcgacttcctgcacgggccgcgcacgcagcgccgcgctgccgcgcagatcgcgcaggcactgctgggcgccgaggagcgcaaagtggaaatcgccttctaccggaaagatgggagctgcttcctatgtctggtggatgtggtgcccgtgaagaacgaggatggggctgtcatcatgttcatcctcaatttcgaggtggtgatggagaaggacatggtggggtccccggctcatgacaccaaccaccggggcccccccaccagctggctggccccaggccgcgccaagaccttccgcctgaagctgcccgcgctgctggcgctgacggcccgggagtcgtcggtgcggtcgggcggcgcgggcggcgcgggcgccccgggggccgtggtggtggacgtggacctgacgcccgcggcacccagcagcgagtcgctggccctggacgaagtgacagccatggacaaccacgtggcagggctcgggcccgcggaggagcggcgtgcgctggtgggtcccggctctccgccccgcagcgcgcccggccagctcccatcgccccgggcgcacagcctcaaccccgacgcctcgggctccagctgcagcctggcccggacgcgctcccgagaaagctgcgccagcgtgcgccgcgcctcgtcggccgacgacatcgaggccatgcgcgccggggtgctgcccccgccaccgcgccacgccagcaccggggccatgcacccactgcgcagcggcttgctcaactccacctcggactccgacctcgtgcgctaccgcaccattagcaagattccccaaatcaccctcaactttgtggacctcaagggcgaccccttcttggcttcgcccaccagtgaccgtgagatcatagcacctaagataaaggagcgaacccacaatgtcactgagaaggtcacccaggtcctgtccctgggcgccgacgtgctgcctgagtacaagctgcaggcaccgcgcatccaccgctggaccatcctgcattacagccccttcaaggccgtgtgggactggctcatcctgctgctggtcatctacacggctgtcttcacaccctactcggctgccttcctgctgaaggagacggaagaaggcccgcctgctaccgagtgtggctacgcctgccagccgctggctgtggtggacctcatcgtggacatcatgttcattgtggacatcctcatcaacttccgcaccacctacgtcaatgccaacgaggaggtggtcagccaccccggccgcatcgccgtccactacttcaagggctggttcctcatcgacatggtggccgccatccccttcgacctgctcatcttcggctctggctctgaggagctgatcgggctgctgaagactgcgcggctgctgcggctggtgcgcgtggcgcggaagctggatcgctactcagagtacggcgcggccgtgctgttcttgctcatgtgcacctttgcgctcatcgcgcactggctagcctgcatctggtacgccatcggcaacatggagcagccacacatggactcacgcatcggctggctgcacaacctgggcgaccagataggcaaaccctacaacagcagcggcctgggcggcccctccatcaaggacaagtatgtgacggcgctctacttcaccttcagcagcctcaccagtgtgggcttcggcaacgtctctcccaacaccaactcagagaagatcttctccatctgcgtcatgctcattggctccctcatgtatgctagcatcttcggcaacgtgtcggccatcatccagcggctgtactcgggcacagcccgctaccacacacagatgctgcgggtgcgggagttcatccgcttccaccagatccccaatcccctgcgccagcgcctcgaggagtacttccagcacgcctggtcctacaccaacggcatcgacatgaacgcggtgctgaagggcttccctgagtgcctgcaggctgacatctgcctgcacctgaaccgctcactgctgcagcactgcaaacccttccgaggggccaccaagggctgccttcgggccctggccatgaagttcaagaccacacatgcaccgccaggggacacactggtgcatgctggggacctgctcaccgccctgtacttcatctcccggggctccatcgagatcctgcggggcgacgtcgtcgtggccatcctggggaagaatgacatctttggggagcctctgaacctgtatgcaaggcctggcaagtcgaacggggatgtgcgggccctcacctactgtgacctacacaagatccatcgggacgacctgctggaggtgctggacatgtaccctgagttctccgaccacttctggtccagcctggagatcaccttcaacctgcgagataccaacatgatcccgggctcccccggcagtacggagttagagggtggcttcagtcggcaacgcaagcgcaagttgtccttccgcaggcgcacggacaaggacacggagcagccaggggaggtgtcggccttggggccgggccgggcgggggcagggccgagtagccggggccggccgggggggccgtggggggagagcccgtccagtggcccctccagccctgagagcagtgaggatgagggcccaggccgcagctccagccccctccgcctggtgcccttctccagccccaggccccccggagagccgccgggtggggagcccctgatggaggactgcgagaagagcagcgacacttgcaaccccctgtcaggcgccttctcaggagtgtccaacattttcagcttctggggggacagtcggggccgccagtaccaggagctccctcgatgccccgcccccacccccagcctcctcaacatccccctctccagcccgggtcggcggccccggggcgacgtggagagcaggctggatgccctccagcgccagctcaacaggctggagacccggctgagtgcagacatggccactgtcctgcagctgctacagaggcagatgacgctggtcccgcccgcctacagtgctgtgaccaccccggggcctggccccacttccacatccccgctgttgcccgtcagccccctccccaccctcaccttggactcgctttctcaggtttcccagttcatggcgtgtgaggagctgcccccgggggccccagagcttccccaagaaggccccacacgacgcctctccctaccgggccagctgggggccctcacctcccagcccctgcacagacacggctcggacccgggcagttagtggggctgcccagtgtggacacgtggctcacccagggatcaaggcgctgctgggccgctccccttggaggccctgctcaggaggccctgaccgtggaaggggagaggaactcgaaagcacagctcctcccccagcccttgggaccatcttctcctgcagtcccctgggccccagtgagaggggcaggggcagggccggcagtaggtggggcctgtggtccccccactgccctgagggcattagctggtctaactgcccggaggcacccggccctgggccttaggcacctcaaggacttttctgctatttactgctcttattgttaaggataataattaaggatcatatgaataattaatgaagatgctgatgactatgaataataaataattatcctgaggagaaaa

SEQ ID NO: 64 - protein, 1159 aa, Homo sapiens
MPVRRGHVAPQNTFLDTIIRKFEGQSRKFIIANARVENCAVIYCNDGFCELCGYSRAEVMQRPCTCDFLHGPRTQRRAAAQIAQALLGAEERKVEIAFYRKDGSCFLCLVDVVPVKNEDGAVIMFILNFEVVMEKDMVGSPAHDTNHRGPPTSWLAPGRAKTFRLKLPALLALTARESSVRSGGAGGAGAPGAVVVDVDLTPAAPSSESLALDEVTAMDNHVAGLGPAEERRALVGPGSPPRSAPGQLPSPRAHSLNPDASGSSCSLARTRSRESCASVRRASSADDIEAMRAGVLPPPPRHASTGAMHPLRSGLLNSTSDSDLVRYRTISKIPQITLNFVDLKGDPFLASPTSDREIIAPKIKERTHNVTEKVTQVLSLGADVLPEYKLQAPRIHRWTILHYSPFKAVWDWLILLLVIYTAVFTPYSAAFLLKETEEGPPATECGYACQPLAVVDLIVDIMFIVDILINFRTTYVNANEEVVSHPGRIAVHYFKGWFLIDMVAAIPFDLLIFGSGSEELIGLLKTARLLRLVRVARKLDRYSEYGAAVLFLLMCTFALIAHWLACIWYAIGNMEQPHMDSRIGWLHNLGDQIGKPYNSSGLGGPSIKDKYVTALYFTFSSLTSVGFGNVSPNTNSEKIFSICVMLIGSLMYASIFGNVSAIIQRLYSGTARYHTQMLRVREFIRFHQIPNPLRQRLEEYFQHAWSYTNGIDMNAVLKGFPECLQADICLHLNRSLLQHCKPFRGATKGCLRALAMKFKTTHAPPGDTLVHAGDLLTALYFISRGSIEILRGDVVVAILGKNDIFGEPLNLYARPGKSNGDVRALTYCDLHKIHRDDLLEVLDMYPEFSDHFWSSLEITFNLRDTNMIPGSPGSTELEGGFSRQRKRKLSFRRRTDKDTEQPGEVSALGPGRAGAGPSSRGRPGGPWGESPSSGPSSPESSEDEGPGRSSSPLRLVPFSSPRPPGEPPGGEPLMEDCEKSSDTCNPLSGAFSGVSNIFSFWGDSRGRQYQELPRCPAPTPSLLNIPLSSPGRRPRGDVESRLDALQRQLNRLETRLSADMATVLQLLQRQMTLVPPAYSAVTTPGPGPTSTSPLLPVSPLPTLTLDSLSQVSQFMACEELPPGAPELPQEGPTRRLSLPGQLGALTSQPLHRHGSDPGS

SEQ ID NO: 65 - DNA, 3352 bp, Homo sapiens
gcggccgaaagatgccggtccgcaggggccacgtcgctccccaaaacacttacctggacaccatcatccgcaagttcgagggccaaagtcggaagttcctgattgccaatgctcagatggagaactgcgccatcatttactgcaacgacggcttctgcgaactcttcggctactcccgagtggaggtgatgcagcaaccctgcacctgcgacttcctcacaggccccaacacaccaagcagcgccgtgtcccgcctagcgcaggccctgctgggggctgaggagtgcaaggtggacatcctctactaccgcaaggatgcctccagcttccgctgcctggtagatgtggtgcccgtgaagaacgaggacggggctgtcatcatgttcattctcaacttcgaggacctggcccagctcctggccaagtgcagcagccgcagcttgtcccagcgcctgttgtcccagagcttcctgggctccgagggctctcacggcaggccaggcggaccagggccaggcacaggcaggggcaagtacaggaccatcagccagatcccacagttcacgctcaacttcgtggagttcaacttggagaagcaccgctccagctccaccacggagattgagatcatcgcgccccataaggtggtggagcggacacagaacgtcactgagaaggtcacccaggtcctgtccctgggcgcggatgtgctgccggagtacaagctgcaggcgccgcgcatccaccgctggaccatcctgcactacagccccttcaaggccgtgtgggactggctcatcctgctgctggtcatctacacggctgtcttcacgccctactcagccgccttcctgctcagcgaccaggacgaatcacggcgtggggcctgcagctatacctgcagtcccctcactgtggtggatctcatcgtggacatcatgttcgtcgtggacatcgtcatcaacttccgcaccacctatgtcaacaccaatgatgaggtggtcagccacccccgccgcatcgccgtccactacttcaagggctggttcctcattgacatggtggccgccatccctttcgacctcctgatcttccgcactggctccgatgagaccacaaccctgattgggctattgaagacagcgcggctgctgcggctggtgcgcgtagcacggaagctggaccgctactctgagtatggggcggctgtgctcttcttgctcatgtgcaccttcgcgctcatagcgcactggctggcctgcatctggtacgccatcggcaatgtggagcggccctacctagaacacaagatcggctggctggacagcctgggtgtgcagcttggcaagcgctacaacggcagcgacccagcctcgggcccctcggtgcaggacaagtatgtcacagccctctacttcaccttcagcagcctcaccagcgtgggcttcggcaatgtctcgcccaacaccaactccgagaaggtcttctccatctgcgtcatgctcatcggctccctgatgtacgccagcatcttcgggaacgtgtccgcgatcatccagcgcctgtactcgggcaccgcgcgctaccacacgcagatgctgcgtgtcaaggagttcatccgcttccaccagatccccaacccactgcgccagcgcctggaggagtatttccagcacgcctggtcctacaccaatggcattgacatgaacgcggtgctgaagggcttccccgagtgcctgcaggctgacatctgcctgcacctgcaccgcgcactgctgcagcactgcccagctttcagcggcgccggcaagggctgcctgcgcgcgctagccgtcaagttcaagaccacccacgcgccgcctggggacacgctggtgcacctcggcgacgtgctctccaccctctacttcatctcccgaggctccatcgagatcctgcgcgacgacgtggtcgtggccatcctaggaaagaatgacatctttggggaacccgtcagcctccatgcccagccaggcaagtccagtgcagacgtgcgggctctgacctactgcgacctgcacaagatccagcgggcagatctgctggaggtgctggacatgtacccggcctttgcggagagcttctggagtaagctggaggtcaccttcaacctgcgggacgcagccgggggtctccactcatccccccgacaggctcctggcagccaagaccaccaaggtttctttctcagtgacaaccagtcagggtctccccatgagctggggccccagttcccctctaagggctacagcctcctgggtcctgggagccagaactccatgggggcaggaccttgtgctccagggcacccagatgcagcccctcccctgagcatctcagatgcatctggcctctggcctgagctactgcaggaaatgcccccaaggcacagcccccaaagccctcaggaagacccagattgctggcctctgaagctgggctccaggctagagcagctccaggcccagatgaacaggctggagtcccgcgtgtcctcagacctcagccgcatcttgcagctcctccagaagcccatgccccagggccacgccagctacattctggaagcccctgcctccaatgacctggccttggttcctatagcctcggagacgacgagtccagggcccaggctgccccagggctttctgcctcctgcacagaccccaagctatggagacttggatgactgtagtccaaagcacaggaactcctcccccaggatgcctcacctggctgtggcaacggacaaaactctggcaccatcctcagaacaggaacagcctgaggggctctggccacccctagcctcacctctacatcccctggaagtacaaggactcatctgtggtccctgcttctcctccctccctgaacaccttggctctgttcccaagcagctggacttccagagacatggctcagatcctggatttgcagggagttggggccactgaactccaagataaagacaccatgaggggactgaaggtgggcaaggtgagagttaaggatcttggggaggtggccgggtgcagtggctcgcctgtaatcccagcactttgggaggccgaggcgggcggatcagaccatcctggctaacacggtgaaaccccacctctactaaaattaaaaaagaaaaaaaatagccgggcgtggtggcaggcgcctgtaatcccagctactggggaggctgaggcaggagaatggcatgaacccgggaggtggaggttgcagggagccgaggccgcaccactgcactccagcctgggtgacagagtgagactccaactcaaaaaaaaaaaaaaaaaaa

SEQ ID NO: 66 - protein, 994 aa, Homo sapiens
MPVRRGHVAPQNTYLDTIIRKFEGQSRKFLIANAQMENCAIIYCNDGFCELFGYSRVEVMQQPCTCDFLTGPNTPSSAVSRLAQALLGAEECKVDILYYRKDASSFRCLVDVVPVKNEDGAVIMFILNFEDLAQLLAKCSSRSLSQRLLSQSFLGSEGSHGRPGGPGPGTGRGKYRTISQIPQFTLNFVEFNLEKHRSSSTTEIEIIAPHKVVERTQNVTEKVTQVLSLGADVLPEYKLQAPRIHRWTILHYSPFKAVWDWLILLLVIYTAVFTPYSAAFLLSDQDESRRGACSYTCSPLTVVDLIVDIMFVVDIVINFRTTYVNTNDEVVSHPRRIAVHYFKGWFLIDMVAAIPFDLLIFRTGSDETTTLIGLLKTARLLRLVRVARKLDRYSEYGAAVLFLLMCTFALIAHWLACIWYAIGNVERPYLEHKIGWLDSLGVQLGKRYNGSDPASGPSVQDKYVTALYFTFSSLTSVGFGNVSPNTNSEKVFSICVMLIGSLMYASIFGNVSAIIQRLYSGTARYHTQMLRVKEFIRFHQIPNPLRQRLEEYFQHAWSYTNGIDMNAVLKGFPECLQADICLHLHRALLQHCPAFSGAGKGCLRALAVKFKTTHAPPGDTLVHLGDVLSTLYFISRGSIEILRDDVVVAILGKNDIFGEPVSLHAQPGKSSADVRALTYCDLHKIQRADLLEVLDMYPAFAESFWSKLEVTFNLRDAAGGLHSSPRQAPGSQDHQGFFLSDNQSGSPHELGPQFPSKGYSLLGPGSQNSMGAGPCAPGHPDAAPPLSISDASGLWPELLQEMPPRHSPQSPQEDPDCWPLKLGSRLEQLQAQMNRLESRVSSDLSRILQLLQKPMPQGHASYILEAPASNDLALVPIASETTSPGPRLPQGFLPPAQTPSYGDLDDCSPKHRNSSPRMPHLAVATDKTLAPSSEQEQPEGLWPPLASPLHPLEVQGLICGPCFSSLPEHLGSVPKQLDFQRHGSDPGFAGSWGH

SEQ ID NO: 67 - DNA, 4113 bp, Homo sapiens
caaagagcggctcgcgcgctggcctgggctctaaccgaggagagatcccgggagaactccagagctccgggggagcgctcctcggaagaccggggccaacatgcctgtgcgcagggggcatgtggcaccacaaaatacatttctggggaccatcattcggaaatttgaagggcaaaataaaaaatttatcattgcaaatgccagagtgcagaactgtgccatcatttattgcaacgatgggttctgtgagatgactggtttctccaggccagatgtcatgcaaaagccatgcacctgcgactttctccatggacccgagaccaagaggcatgatattgcccaaattgcccaggcattgctggggtcagaagagaggaaagtggaggtcacctactatcacaaaaatgggtccacttttatttgtaacactcacataattccagtgaaaaaccaagagggcgtggctatgatgttcatcattaattttgaatatgtgacggataatgaaaacgctgccaccccagagagggtaaacccaatattaccaatcaaaactgtaaaccggaaattttttgggttcaaattccctggtctgagagttctcacttacagaaagcagtccttaccacaagaagaccccgatgtggtggtcatcgattcatctaaacacagtgatgattcagtagccatgaagcattttaagtctcctacaaaagaaagctgcagcccctctgaagcagatgacacaaaagctttgatacagcccagcaaatgttctcccttggtgaatatatccggacctcttgaccattcctctcccaaaaggcaatgggaccgactctaccctgacatgctgcagtcaagttcccagctgtcccattccagatcaagggaaagcttatgtagtatacggagagcatcttcggtccatgatatagaaggattcggcgtccaccccaagaacatatttagagaccgacatgccagcgaagacaatggtcgcaatgtcaaagggccttttaatcatatcaagtcaagcctcctgggatccacatcagattcaaacctcaacaaatacagcaccattaacaagattccacagctcactctgaatttttcagaggtcaaaactgagaaaaagaattcatcacctccttcttcagataaaaccattattgcacccaaggttaaagatcgaacacacaatgtgactgagaaagtgacccaggttctctctttaggagcagatgtcctacctgaatacaaactgcagacaccacgcatcaacaagtttacgatattgcactacagccctttcaaggcagtctgggactggcttatcctgctgttggtcatatacactgctatatttactccctactctgcagccttcctcctcaatgacagagaagaacagaagagacgagaatgtggctattcttgtagccctttgaatgtggtagacttgattgtggatattatgtttatcatagatattttaataaacttcagaacaacatatgttaatcagaatgaagaagtggtaagtgatcccgccaaaatagcaatacactacttcaaaggctggttcctgattgacatggttgcagcaattccttttgacttgctgatttttggatcaggttctgatgagacaacaacattaattggtcttttgaagactgcccgactcctccgtcttgtgcgcgtggccaggaaactggatcgatattcagaatatggcgctgctgttctaatgctctcaatgtgcatctttgccctgaatgcacactggctggcttgcatttggtatgcgattgggaatgtagaaaggccttacctgactgacaaaatcggatggttggattccttaggacagcaaattgggaaacgttacaatgacagtgactcaagttctggaccatccattaaagacaaatacgtcacagcactttattttaccttcagcagtttaaccagtgtaggattcgggaatgtgtctcctaacacgaattcggagaaaatcttttcaatttgtgtcatgttgattggctcactaatgtatgcaagcatttttgggaatgtatctgcaattatccaaagactatactcgggaactgccaggtaccacatgcagatgctgcgagtaaaagagttcattcgctttcaccaaatccccaaccctctgaggcaacgtcttgaagaatatttccagcacgcatggacttacaccaatggcattgacatgaacatggtcctaaagggtttcccagaatgcttacaagcagacatttgtctacatctcaaccagacattgctgcaaaactgcaaagcctttcggggggcaagtaaaggttgccttagagctttggcaatgaagttcaaaaccacccatgcactccaaggagacaccctcgttcactgtggggatgtcctcactgcactttatttcttatccagaggctccattgaaatctcaaagaatgacatggtggtggctattctgggaaaaaatgatatatttggagaaatggttcatctttatgccaaacctggaaagtctaatgcagatgtaagagccctcacatactgtgacttgcataagattcagcgagaagacttgttagaggttttggatatgtatcctgagttttctgatcactttctaacaaacctagagttgactttcaacctaaggcatgagagcgcaaaggctgatctcctacgatcacaatccatgaatgattcagaaggagacaactgtaaactaagaagaaggaaattgtcatttgaaagtgaaggagagaaagaaaacagtacaaatgatcctgaagactctgcagataccataagacattatcagagttccaagagacactttgaagagaaaaaaagcagatcctcatctttcatctcctccattgatgatgaacaaaagccgctcttctcaggaatagtagactcttctccaggaatagggaaagcatctgggctcgattttgaagaaacagtgcccacctcaggaagaatgcacatagataaaagaagtcactcttgcaaagatatcactgacatgcgaagctgggaacgagaaaatgcacatccccagcctgaagactccagtccatctgcacttcagcgagctgcctggggtatctctgaaaccgaaagcgacctcacctacggggaagtggaacaaagattagatctgctccaggagcaacttaacaggcttgaatcccaaatgaccactgacatccagaccatcttacagttgctgcagaaacaaaccactgtggtccccccagcctacagtatggtaacagcaggatcagaatatcagagacccatcatccagctgatgagaaccagtcaaccggaagcatccatcaaaactgaccgaagtttcagcccttcctcacaatgtcctgaatttctagaccttgaaaaatctaaacttaaatccaaagaatccctttcaagtggggtgcatctgaacacagcttcagaagacaacttgacttcacttttaaaacaagacagtgatctctctttagagcttcacctgcggcaaagaaaaacttacgttcatccaattaggcatccttctttgccagattcatccctaagcactgtaggaatcgtgggtcttcataggcatgtttctgatcctggtcttccagggaaataatcattttgtactatttactccacatacaatgtaagtgcttttaatggctgttttcctttttctatttaaatcctctctacttgactcaggggctcacaaggtaccattatatgcaaaagtactgtatattttcctaaattgaagcttgtaaggtaaaactgagcagttaggatgtaaatatacataagaacttttggttccaaatgttaaaactgccagcatctcacggcaccttattttttatttttattttttaaatcacatgcatgttaggaaactccaatttctcttgcatggagactcctatttactgcttttactaaaccagtacttcgttatgaaaatgccttccacgcaaataagaaaccaagggataaaactgttcatggatgcaactcaaattcagatgatcatcaaggcat

SEQ ID NO: 68 - protein, 1196 aa, Homo sapiens [sequence omitted]

SEQ ID NO: 69 - DNA, 5107 bp, Homo sapiens
cctgccacagccggggcggctggaactctctccctttctccctccatccttccacttcccctgctcggccccgccgtcaggccgggtcccccttccctgccgtcatcaggttccccttctcccttcttggcactttcctttcgaaccatccttctggacaaactttgatggagaatttcacaccacgctggaaaaatgccggttatgaaaggattactggcgccgcaaaacaccttcctggacaccatcgccacccgttttgacggaacacatagcaacttcatccttgccaatgcccaggtggctaagggtttccccatagtctactgttccgatggcttctgcgagcttgctggatttgcccgaactgaagtcatgcagaagagttgtagctgcaagttcttatttggggttgaaaccaatgagcaactgatgcttcaaatagaaaagtcactggaggagaaaacagaattcaaaggagaaattatgttctacaagaaaaacgggtctccattttggtgcctactggatattgttcccataaagaatgaaaaaggagatgtagtactttttctggcctcgttcaaagatataacagatacaaaagtgaagattactccagaagataaaaaagaagacaaagtcaaaggaagatcaagagcagggacccactttgactcagcccggagacggagtcgagcagtcctttatcacatctctgggcacctgcaaagaagagaaaagaacaaattgaaaataaataacaatgtttttgtagataaaccagcatttccggagtataaagtttctgatgcaaaaaagtccaaattcatacttctgcattttagcacttttaaagctggctgggactggcttattttgttggcaacgttttatgttgctgtgactgtaccttacaacgtttgctttattggcaatgacgacctgtccacaactcggagcacaaccgtcagtgacattgcagtggagattctttttattatagatattattttaaatttccgaacaacttatgtcagcaagtctggccaagttatctttgaagcaagatcaatttgcatccactatgtcacaacctggttcatcattgatttaatcgctgccctgccttttgatcttctgtatgctttcaacgtcacagtggtgtctctcgtgcatcttctaaagacagtgcgcctcttgcgtcttttgcgtctgctgcagaagttagaccgctattcccaacacagtactatcgtcctgactctgctcatgtccatgtttgcactccttgcacactggatggcgtgtatctggtacgtcattggaaaaatggagagggaagacaacagccttctgaagtgggaagttggttggcttcatgagttgggaaagagactggaatctccatactatggcaacaataccttggggggcccgtcgatccgaagtgcctatattgccgctctgtacttcacgctgagcagcctcaccagcgtgggttttgggaacgtctctgctaatacagatgcagaaaagatcttctccatctgcaccatgctgattggtgccttgatgcacgccttggtgtttggaaacgtgacagcaatcatacagaggatgtactccagatggtccctctatcacactagaactaaggatctgaaagatttcatccgtgtccatcacttgccccaacaactcaagcagaggatgctcgaatattttcaaacaacctggtcagtcaacaatggaatagattcaaatgagcttttgaaagactttccagatgaactgcgttctgacatcactatgcacttgaacaaggagatcttacagttgtccctttttgaatgtgccagccggggctgcctcaggtctctgtctctacacatcaaaacctctttctgtgctccgggggagtatctgctgcgtcaaggggatgctttgcaggccatctactttgtatgctcgggctccatggaagttcttaaagacagcatggtgctggctattcttgggaaaggggatttaattggagcaaatctatcaattaaggaccaagtgatcaagaccaatgcagatgtaaaggctttaacctactgtgatctccagtgtatcatcctcaaaggactctttgaagtgctagacctttacccagaatatgctcacaaattcgtggaagacattcagcatgacctcacatacaacctccgagaaggtcatgagagtgatgtgatatcaagactatcaaacaaatctatggtctcacagtcagagcccaagggaaatggcaacatcaacaagcgactcccatccattgtggaagatgaggaagaggaggaggagggggaggaagaggaggcagtctccctctctcccatctgcacaaggggatcttcttcgcgcaacaagaaggttggaagcaataaagcctacctgggcttaagcttaaagcaactggcctcgggaacggtgccctttcactcgcctatcagagtctccaggtcaaattcccccaaaaccaagcaggaaattgacccccccaaccataataaaaggaaagagaagaacttgaaattgcaactttcaactttgaataatgctggacccccagacctcagtccaaggattgttgatggaattgaagatggaaacagcagtgaagaaagtcagacttttgattttggctctgaacgaatcagatcagagcccagaatttctcctcctcttggagatccagagattggagctgctgttctcttcatcaaagcagaggagaccaagcagcagataaacaaactcaacagtgaggtaacaacattgactcaggaagtttctcagttgggtaaagacatgagaaatgtgatccggcttctggaaaacgttctgtcacctcagcagccatcacggttttgctctttgcacagcacctctgtgtgtccctccagggagagcttacagaccagaacgagctggagtgcacaccagccttgcctacacttgcaaacaggcggggctgcttatacccaagcacaactttgtagcagtaatatcacctcagacatttggagtgtggatccctcctctgtggggagcagcccccaacgaactggagctcatgagcaaaatcctgcagacagtgaactttatcattctccaagccttgattattcaccttcccactaccaggttgtccaagaaggtcatttgcaatttttaaggtgcatctctccacattcagattctacgttgacgcctctgcagtccatttcagcaactctctcatcttctgtctgctcctcttcggaaacatctttgcacctagttctcccaagcagatcagaggagggcagcttcagtcagggaactgtgagttccttcagtctggaaaacttaccaggatcttggaaccaggaaggaatggcatcagcttctacaaaacctttggagaaccttccactggaagttgtcacaagcacagcagaagtgaaagataacaaagccataaatgtatgatattagtgcccatgatgcagcagctaatttcaaacctaccactgcatgacagttttagtttgcctttttgcctctggtgggcatgaagactgagcaaagctgggaatcctgcagaaaagagtgtgaggagccagggaaaggcagaaccacctccatgctgtagcaaacaatttctagatactagaagcataatagaaacatttttctgtacaggtattaaactactggtctgtttgacagactttggtaacaatccaaagaccctgagggtctgagcagctagaagtcctagacaaagaacttgtggatgacttttgtcccatgtggcttttgtgaagtatggcaaaggtttttcatgagtgcctgattgttattcctgaacaatatccatagcactgttggcctcaggagtgcacagctcctgctgatgtatttttctttttgtgaaggcaaagggacaattatcactgcatgtcatctcctagacaatcagtcaaatagagctggtggccagtggttagctattcgcacgttatttgccatgtaaatgaaaacgtctttatttatcaaaaaaacacagaggctatttttatatccttggtatgaaatatgtatttaaactatttaaatatttataaagaaatgaatgttttcttttcattttggtaaaaaaaaagcttgctgttttaacaagaaatgcactactgttgtgtatagtagatcaaaaattatttattactaagaggatgtagtttccaaaggaatcccccattttttctgcatgcagtttgcaacaaatgtattctcatgcttctggattataaaagaaaagtgaagtcatattttgttaatgaaataaaaacatggactgagtgtcaactacatgagctttggcatggggatagagaggctccatctaggctctgccaactcatgtcaatgacatgatttaaggtccgttgtgccagcagaaatgtctctcctctaggtatcgtattttgttgctcaagaatccaaaatgggtctgtggacatagggcaatttggggctcaaagtgagggagaaaacctgggtgtgtcctttcccagtgcttttcttttacaagaggtagtagactagtggaaatccccaaatggagccaagacttctgagctataacttgtgggagtaataccagcttgcaatgggtcagcactttaccttttttctttaaggctcccaacaatgctatacagcgcagttgtttccattcctatttttaataaatctcaggggaagcctcagagattacacagttaggatgctgacacagtctagaatccataatgctccctacatctcacactaacaggcaaattcagatgctgggattggcaatgatttaagcaccttcactaaagtcttattttatgttttagaacagttacagtctaattgtcttggacattttgggaagatatattgggttcacattctggagttctctttattttccaccacaaaaaataatctgagaattgtatcattaaaagtatctaaacacacaaaaaaaaaaaaaaaaaaaaaaaaaaaaaaaaaaaaaaaaaaa

SEQ ID NO: 70 - protein, 1107 aa, Homo sapiens [sequence omitted]

SEQ ID NO: 71 - DNA, 3610 bp, Homo sapiens
cggagggatggggcgggcagccgcgggcgcctaagatgccggccatgcggggcctcctggcgcctcagaacaccttcctggacaccatcgctacgcgcttcgacggcacgcacagtaacttcgtgctgggcaacgcccaggtggcggggctcttccccgtggtctactgctctgatggcttctgtgacctcacgggcttctcccgggctgaggtcatgcagcggggctgtgcctgctccttcctttatgggccagacaccagtgagctcgtccgccaacagatccgcaaggccctggacgagcacaaggagttcaaggctgagctgatcctgtaccggaagagcgggctcccgttctggtgtctcctggatgtgatacccataaagaatgagaaaggggaggtggctctcttcctagtctctcacaaggacatcagcgaaaccaagaaccgagggggccccgacagatggaaggagacaggtggtggccggcgccgatatggccgggcacgatccaaaggcttcaatgccaaccggcggcggagccgggccgtgctctaccacctgtccgggcacctgcagaagcagcccaagggcaagcacaagctcaataagggggtgtttggggagaaaccaaacttgcctgagtacaaagtagccgccatccggaagtcgcccttcatcctgttgcactgtggggcactgagagccacctgggatggcttcatcctgctcgccacactctatgtggctgtcactgtgccctacagcgtgtgtgtgagcacagcacgggagcccagtgccgcccgcggcccgcccagcgtctgtgacctggccgtggaggtcctcttcatccttgacattgtgctgaatttccgtaccacattcgtgtccaagtcgggccaggtggtgtttgccccaaagtccatttgcctccactacgtcaccacctggttcctgctggatgtcatcgcagcgctgccctttgacctgctacatgccttcaaggtcaacgtgtacttcggggcccatctgctgaagacggtgcgcctgctgcgcctgctgcgcctgcttccgcggctggaccggtactcgcagtacagcgccgtggtgctgacactgctcatggccgtgttcgccctgctcgcgcactgggtcgcctgcgtctggttttacattggccagcgggagatcgagagcagcgaatccgagctgcctgagattggctggctgcaggagctggcccgccgactggagactccctactacctggtgggccggaggccagctggagggaacagctccggccagagtgacaactgcagcagcagcagcgaggccaacgggacggggctggagctgctgggcggcccgtcgctgcgcagcgcctacatcacctccctctacttcgcactcagcagcctcaccagcgtgggcttcggcaacgtgtccgccaacacggacaccgagaagatcttctccatctgcaccatgctcatcggcgccctgatgcacgcggtggtgtttgggaacgtgacggccatcatccagcgcatgtacgcccgccgctttctgtaccacagccgcacgcgcgacctgcgcgactacatccgcatccaccgtatccccaagcccctcaagcagcgcatgctggagtacttccaggccacctgggcggtgaacaatggcatcgacaccaccgagctgctgcagagcctccctgacgagctgcgcgcagacatcgccatgcacctgcacaaggaggtcctgcagctgccactgtttgaggcggccagccgcggctgcctgcgggcactgtctctggccctgcggcccgccttctgcacgccgggcgagtacctcatccaccaaggcgatgccctgcaggccctctactttgtctgctctggctccatggaggtgctcaagggtggcaccgtgctcgccatcctagggaagggcgacctgatcggctgtgagctgccccggcgggagcaggtggtaaaggccaatgccgacgtgaaggggctgacgtactgcgtcctgcagtgtctgcagctggctggcctgcacgacagccttgcgctgtaccccgagtttgccccgcgcttcagtcgtggcctccgaggggagctcagctacaacctgggtgctgggggaggctctgcagaggtggacaccagctccctgagcggcgacaatacccttatgtccacgctggaggagaaggagacagatggggagcagggccccacggtctccccagccccagctgatgagccctccagccccctgctgtcccctggctgcacctcctcatcctcagctgccaagctgctatccccacgtcgaacagcaccccggcctcgtctaggtggcagagggaggccaggcagggcaggggctttgaaggctgaggctggcccctctgctcccccacgggccctagaggggctacggctgccccccatgccatggaatgtgcccccagatctgagccccagggtagtagatggcattgaagacggctgtggctcggaccagcccaagttctctttccgcgtgggccagtctggcccggaatgtagcagcagcccctcccctggaccagagagcggcctgctcactgttccccatgggcccagcgaggcaaggaacacagacacactggacaagcttcggcaggcggtgacagagctgtcagagcaggtgctgcagatgcgggaaggactgcagtcacttcgccaggctgtgcagcttgtcctggcgccccacagggagggtccgtgccctcgggcatcgggagaggggccgtgcccagccagcacctccgggcttctgcagcctctgtgtgtggacactggggcatcctcctactgcctgcagcccccagctggctctgtcttgagtgggacttggccccaccctcgtccggggcctcctcccctcatggcaccctggccctggggtcccccagcgtctcagagctccccctggcctcgagccacagctttctggacctccacctcagactcagagccccctgcctcaggagacctctgctctgagcccagcacccctgcctcccctcctccttctgaggaaggggctaggactgggcccgcagagcctgtgagccaggctgaggctaccagcactggagagcccccaccagggtcagggggcctggccttgccctgggacccccacagcctggagatggtgcttattggctgccatggctctggcacagtccagtggacccaggaagaaggcacaggggtctgagtaccagccctagaactcagcgttgccaggtgtgctgccatctgctgttcggcccaacctcagagtgaaggcagggtggcagcctccccacggactccatgcggcccgctggctcagggcagggagcctggaagcaaaggaggacctggctcctgactctcagagaggataggctggatccctggggcaggcctctcctcggcctgctcctctgacctcccggtctccctctgcaggctgggggcagaggcctgaggacaaggaagagctttgccatcccctgcatgtgcccctgcctctacctgtccccaaatttttatatt

SEQ ID NO: 72 - protein, 1083 aa, Homo sapiens
MPAMRGLLAPQNTFLDTIATRFDGTHSNFVLGNAQVAGLFPVVYCSDGFCDLTGFSRAEVMQRGCACSFLYGPDTSELVRQQIRKALDEHKEFKAELILYRKSGLPFWCLLDVIPIKNEKGEVALFLVSHKDISETKNRGGPDRWKETGGGRRRYGRARSKGFNANRRRSRAVLYHLSGHLQKQPKGKHKLNKGVFGEKPNLPEYKVAAIRKSPFILLHCGALRATWDGFILLATLYVAVTVPYSVCVSTAREPSAARGPPSVCDLAVEVLFILDIVLNFRTTFVSKSGQVVFAPKSICLHYVTTWFLLDVIAALPFDLLHAFKVNVYFGAHLLKTVRLLRLLRLLPRLDRYSQYSAVVLTLLMAVFALLAHWVACVWFYIGQREIESSESELPEIGWLQELARRLETPYYLVGRRPAGGNSSGQSDNCSSSSEANGTGLELLGGPSLRSAYITSLYFALSSLTSVGFGNVSANTDTEKIFSICTMLIGALMHAVVFGNVTAIIQRMYARRFLYHSRTRDLRDYIRIHRIPKPLKQRMLEYFQATWAVNNGIDTTELLQSLPDELRADIAMHLHKEVLQLPLFEAASRGCLRALSLALRPAFCTPGEYLIHQGDALQALYFVCSGSMEVLKGGTVLAILGKGDLIGCELPRREQVVKANADVKGLTYCVLQCLQLAGLHDSLALYPEFAPRFSRGLRGELSYNLGAGGGSAEVDTSSLSGDNTLMSTLEEKETDGEQGPTVSPAPADEPSSPLLSPGCTSSSSAAKLLSPRRTAPRPRLGGRGRPGRAGALKAEAGPSAPPRALEGLRLPPMPWNVPPDLSPRVVDGIEDGCGSDQPKFSFRVGQSGPECSSSPSPGPESGLLTVPHGPSEARNTDTLDKLRQAVTELSEQVLQMREGLQSLRQAVQLVLAPHREGPCPRASGEGPCPASTSGLLQPLCVDTGASSYCLQPPAGSVLSGTWPHPRPGPPPLMAPWPWGPPASQSSPWPRATAFWTSTSDSEPPASGDLCSEPSTPASPPPSEEGARTGPAEPVSQAEATSTGEPPPGSGGLALPWDPHSLEMVLIGCHGSGTVQWTQEEGTGV

SEQ ID NO: 73 - DNA, 3920 bp, Homo sapiens
gtgggccgctcccctctgggaggagggctgcccagaggggtgcgggtgtcgctagcggcccctccccgtgtggggccacgtggcgggtgcgggccgagcccgaggggaagaacctggcccgtggggaggtgggggggaccgaaacggcgctgagccgagccgagagctacggggttcggagcagaggcagcggcagcggcagcggcagtaagagggaggggaggaggcaggagggcgcatggggcgccccggcccctccgacagcgcgccccctccggcccggccgcgctgaaagctccccagcgccgcgccttgaacccacgccccggggccatgccggtcatgaaggggttgctggccccgcaaaacaccttcctggacaccatcgccacccgttttgacggaacgcacagcaacttcctgctggccaacgcacagggcacacggggctttcccatcgtctactgctccgacggcttctgcgagctcacaggctacggtcgcaccgaggtcatgcagaagacctgcagctgccgtttcctctacggcccagagaccagtgagccagccctgcagcgtctgcacaaagccctggagggccaccaggagcaccgggctgaaatctgcttctaccgcaaggatggctcagccttttggtgcctcctggacatgatgcccatcaagaatgagatgggggaggtcgtgctgttcctcttttccttcaaggatatcactcagagtggaagcccaggacttggcccccaaggaggccgcggggacagtaatcacgaaaactcccttggtagaaggggagccacctggaaatttcggtctgccagaagacggagccgtactgtcctacaccgactgaccggccactttggccgccggggccagggaggcatgaaggccaataataacgtgtttgagccaaagccatcagtgcccgagtacaaggtggcctccgtgggggggtctcgctgcctcctcctccactacagcgtctccaaggccatctgggacggccttatcctccttgccaccttctacgttgcggtcaccgtcccctacaatgtctgtttctcgggtgacgatgacacccccatcacttcgcgacacacccttgtcagcgacatcgccgtggaaatgctcttcatcctagatatcatcctgaacttccgcaccacctatgtgtcccagtccggccaggtaatctctgctcctcgttccattggcctccactacctggccacctggttcttcatcgaccttattgctgctctgccctttgacctgctttacatcttcaacatcaccgtgacctcgctggtgcacctactgaagacagtgcggctgttgcggctgctgcggctgctgcagaagctggagcggtactctcagtgcagtgctgtggtgctcacgctgctcatgtcggtctttgcgctccttgcccactggatggcctgcatctggtatgtcatcgggcgccgggagatggaggccaatgacccgctgctctgggacattggctggttgcatgagttgggcaagcgtctggaggtgccctatgtcaatggctcggtgggcggcccatcacggcgcagcgcctacatcgcggcactgtacttcactctaagcagcctcaccagtgtgggctttggcaacgtgtgtgccaacaccgacgcggagaagatcttctccatctgcacgatgctcataggcgccctgatgcacgctgtggtgttcgggaacgtgacagccatcatccagcgcatgtactcgcgccgctcgctctaccacagccgcatgaaggacctcaaggacttcatccgtgtgcaccgcctgccgcggccgctcaagcagcgcatgctcgaatacttccagaccacgtgggccgtcaacagcggcatcgacgccaacgagttactgcgtgacttcccagacgagctgagagctgacattgctatgcacctgaatcgggagatcctgcagctgccgttgttcggggcagcgagcaggggctgcctgcgggccctatcgctgcacatcaagacctcgttctgcgctccgggcgagtacctgttgcgccgtggggatgccctgcaggcacattactatgtctgctccggctcgcttgaggtgctccgagacaacatggtgctggccatcctggggaagggggacctgattggagcagatatccctgagccggggcaggagcctgggttgggagcagacccaaacttcgtgctaaagaccagtgctgatgtgaaagctctgacctactgtggcctgcagcagctgagcagccgagggctggctgaggtcctgaggctctatcctgagtatggggctgccttccgggctggcctgccccgggacctcaccttcaacctgcgccagggctctgacaccagtggcctcagccgcttttcccgatcccctcgcctctcccagccccgctcagaaagcctcggctcctcctcagacaagacgctgccatccatcacagaggccgagagtggcgcggagcctgggggtggtcccaggccccgacggcccctcctgctgcccaacctcagcccagcacggcctcggggctccctggtcagccttttgggcgaggagctgcccccattctcagcccttgtctcctctccttccttatccccatccctgtcccctgccctggctggccagggccacagtgcctcccctcacggcccccccaggtgctctgctgcctggaagccccctcagcttctcattcccccactgggaacctttggacctccggacctcagtccccggatagtggatggcattgaggactctggcagcacagctgaggccccttcattccgattcagcaggaggcctgaactgccaaggccccgctcccaggcgccccctacagggaccaggcccagcccagaattggccagtgaggctgaggaggtgaaggaaaaggtttgccggctgaaccaggagatctctcgtctcaatcaggaggtgtctcagcttagccgggagctgcggcacatcatgggcctgctgcaggccaggctgggtcccccaggccacccagcaggctccgcttggaccccagaccctccttgtccacagctgaggccaccatgcctctctccttgtgcgtccagaccaccacccagcctccaggatactacgcttgctgaagttcactgcccagccagtgtggggaccatggagacagggactgcgctcctggacttgagaccttccatattgcccccctacccctcagagcctgaccctctgggaccctctccagtgccagaggcctcacccccaaccccaagcctcttgaggcacagtttccagtccaggtcagacacgttccactgaccctggcccagggcccaggcctgtctggggtgggcgctgccgctcaccactcagggaggacctgggccccttggcttcctgccttggggtcagcagccaccagctggcctggttggctctggatttctggactttttaatgaagcgtggttacctctgacgctattcccttttccaagccttccccaacctccccctctgtgaggggagccacctgagggctgtggaacccagcaggcatgagatgaaccgcagtgcccattgggctgggcagatgagatcctactttctccccaggacctggaggcaggctgtctctcaaggtggtcttttctgctgctagcaactcaaaaatcccaacagcactccctatcctttccctgaccccagaccgctgccaagcctgttctcccccattacaacatggtctcactcagggcctggactgctccaaaactcgcccaggtctccagctctcctctaccccccaacaccctgggctcacttttggataggaaataaactctttatttt

SEQ ID NO: 74 - protein, 1017 aa, Homo sapiens
MPVMKGLLAPQNTFLDTIATRFDGTHSNFLLANAQGTRGFPIVYCSDGFCELTGYGRTEVMQKTCSCRFLYGPETSEPALQRLHKALEGHQEHRAEICFYRKDGSAFWCLLDMMPIKNEMGEVVLFLFSFKDITQSGSPGLGPQGGRGDSNHENSLGRRGATWKFRSARRRSRTVLHRLTGHFGRRGQGGMKANNNVFEPKPSVPEYKVASVGGSRCLLLHYSVSKAIWDGLILLATFYVAVTVPYNVCFSGDDDTPITSRHTLVSDIAVEMLFILDIILNFRTTYVSQSGQVISAPRSIGLHYLATWFFIDLIAALPFDLLYIFNITVTSLVHLLKTVRLLRLLRLLQKLERYSQCSAVVLTLLMSVFALLAHWMACIWYVIGRREMEANDPLLWDIGWLHELGKRLEVPYVNGSVGGPSRRSAYIAALYFTLSSLTSVGFGNVCANTDAEKIFSICTMLIGALMHAVVFGNVTAIIQRMYSRRSLYHSRMKDLKDFIRVHRLPRPLKQRMLEYFQTTWAVNSGIDANELLRDFPDELRADIAMHLNREILQLPLFGAASRGCLRALSLHIKTSFCAPGEYLLRRGDALQAHYYVCSGSLEVLRDNMVLAILGKGDLIGADIPEPGQEPGLGADPNFVLKTSADVKALTYCGLQQLSSRGLAEVLRLYPEYGAAFRAGLPRDLTFNLRQGSDTSGLSRFSRSPRLSQPRSESLGSSSDKTLPSITEAESGAEPGGGPRPRRPLLLPNLSPARPRGSLVSLLGEELPPFSALVSSPSLSPSLSPALAGQGHSASPHGPPRCSAAWKPPQLLIPPLGTFGPPDLSPRIVDGIEDSGSTAEAPSFRFSRRPELPRPRSQAPPTGTRPSPELASEAEEVKEKVCRLNQEISRLNQEVSQLSRELRHIMGLLQARLGPPGHPAGSAWTPDPPCPQLRPPCLSPCASRPPPSLQDTTLAEVHCPASVGTMETGTALLDLRPSILPPYPSEPDPLGPSPVPEASPPTPSLLRHSFQSRSDTFH

SEQ ID NO: 75 - DNA, 1485 bp, Homo sapiens
atggacgggtccggggagcgcagcctcccggagccgggcagccagagctccgctgccagcgacgacatagagatagtcgtcaacgtggggggcgtgcggcaggtgctgtacggggacctcctcagtcagtaccctgagacccggctggcggagctcatcaactgcttggctgggggctacgacaccatcttctccctgtgcgacgactacgaccccggcaagcgcgagttctactttgacagggacccggacgccttcaagtgtgtcatcgaggtgtactatttcggggaggtccacatgaagaagggcatctgccccatctgcttcaagaacgagatggacttctggaaggtggacctcaagttcctggacgactgttgcaagagccacctgagcgagaagcgcgaggagctggaggagatcgcgcgccgcgtgcagctcatcctggacgacctgggcgtggacgcggccgagggccgctggcgccgctgccagaagtgcgtctggaagttcctggagaagcccgagtcgtcgtgcccggcgcgggtggtggccgagctctccttcctgctcatcctcgtctcgtccgtggtcatgtgcatggacaccatccccgaactgcaggtgctggacgccgagggcaaccgcgtggagcacccgacgctggagaacgtggagacggcgtgcattggctggttcaccctggagtacctgctgcgcctcttctcgtcacccaacaagctgcacttcgcgctgtccttcatgaacattgtggacgtgctggccatcctccccttctacgtgagcctcacgctcacgcacctgggtgcccgcatgatggagctgaccaacgtgcagcaggccgtgcaggcgctgcggatcatgcgcatcgcgcgcatcttcaagctggcccgccactcctcgggcctgcagaccctcacctatgccctcaagcgcagcttcaaggaactggggctgctgctcatgtacctggcagtgggtatcttcgtcttctctgccctgggctacaccatggagcagagccatccagagaccctgtttaagaacatcccccagtccttctggtgggccatcatcaccatgaccaccgtcggctacggcgacatctaccccaagaccacgctgagcaagctcaacgcggccatcagcttcttgtgtggtgtcattgccatcgccctgcccatccaccccatcatcaacaactttgtcaggtactacaacaagcagcgcgtcctggagaccgcggccaagcacgagctggagctgatggaactcaactccagcagcgggggcgagggcaagaccgggggctcccgcagtgacctggacaacctccctccagagcctgcggggaaggaggcgccgagctgcagcagccggctgaagctctcccacagcgacaccttcatccccctcctgaccgaggagaagcaccacaggacccggctccagagttgcaagtga

SEQ ID NO: 76 - protein, 494 aa, Homo sapiens
MDGSGERSLPEPGSQSSAASDDIEIVVNVGGVRQVLYGDLLSQYPETRLAELINCLAGGYDTIFSLCDDYDPGKREFYFDRDPDAFKCVIEVYYFGEVHMKKGICPICFKNEMDFWKVDLKFLDDCCKSHLSEKREELEEIARRVQLILDDLGVDAAEGRWRRCQKCVWKFLEKPESSCPARVVAELSFLLILVSSVVMCMDTIPELQVLDAEGNRVEHPTLENVETACIGWFTLEYLLRLFSSPNKLHFALSFMNIVDVLAILPFYVSLTLTHLGARMMELTNVQQAVQALRIMRIARIFKLARHSSGLQTLTYALKRSFKELGLLLMYLAVGIFVFSALGYTMEQSHPETLFKNIPQSFWWAIITMTTVGYGDIYPKTTLSKLNAAISFLCGVIAIALPIHPIINNFVRYYNKQRVLETAAKHELELMELNSSSGGEGKTGGSRSDLDNLPPEPAGKEAPSCSSRLKLSHSDTFIPLLTEEKHHRTRLQSCK

SEQ ID NO: 77 - DNA, 1542 bp, Homo sapiens
atgaccctcttaccgggagacaattctgactacgactacagcgcgctgagctgcacctcggacgcctccttccacccggccttcctcccgcagcgccaggccatcaagggcgcgttctaccgccgggcgcagcggctgcggccgcaggatgagccccgccagggctgtcagcccgaggaccgccgccgtcggatcatcatcaacgtaggcggcatcaagtactcgctgccctggaccacgctggacgagttcccgctgacgcgcctgggccagctcaaggcctgcaccaacttcgacgacatcctcaacgtgtgcgatgactacgacgtcacctgcaacgagttcttcttcgaccgcaacccgggggccttcggcactatcctgaccttcctgcgcgcgggcaagctgcggctgctgcgcgagatgtgcgcgctgtccttccaggaggagctgctgtactggggcatcgcggaggaccacctggacggctgctgcaagcgccgctacctgcagaagattgaggagttcgcggagatggtggagcgggaggaagaggacgacgcgctggacagcgagggccgcgacagcgagggcccggccgagggcgagggccgcctggggcgctgcatgcggcgactgcgcgacatggtggagaggccgcactcggggctgcctggcaaggtgttcgcctgcctgtcggtgctcttcgtgaccgtcaccgccgtcaacctctccgtcagcaccttgcccagcctgagggaggaggaggagcagggccactgttcccagatgtgccacaacgtcttcatcgtggagtcggtgtgcgtgggctggttctccctggagttcctcctgcggctcattcaggcgcccagcaagttcgccttcctgcggagcccgctgacgctgatcgacctggtggccatcctgccctactacatcacgctgctggtggacggcgccgccgcaggccgtcgcaagcccggcgcgggcaacagctacctggacaaggtggggctggtgctgcgcgtgctgcgggcgctgcgcatcctgtacgtgatgcgcctggcgcgccactccctggggctgcagacgctggggctcacggcccgccgctgcacccgcgagttcgggctcctgctgctcttcctctgcgtggccatcgccctcttcgcgcccctgctctacgtcatcgagaacgagatggccgacagccccgagttcaccagcatccctgcctgctactggtgggctgtcatcaccatgacgacggtggactatggcgacatggtccccaggagcaccccgggccaggtagtggccctgagcagcatcctgagcggcatcctgctcatggccttcccagtcacctccatcttccacaccttctccccctcctacctggagctcaaacaggagcaagagagggtgatgttccggagggcgcagttcctcatcaaaaccaagtcgcagctgagcgtgtcccaggacagtgacatcttgttcggaagtgcctcctcggacaccagagacaataactga

SEQ ID NO: 78 - protein, 513 aa, Homo sapiens [sequence omitted]

SEQ ID NO: 79 - DNA, 1401 bp, Homo sapiens
atggagccatggccctgctccccgggcggcggcggcgggacccgcgcccggcacgtcatcatcaacgtgggcggctgccgcgtgcgcctggcatgggccgcgctggcgcgatgccccctcgcgcgcctggagcgcctgcgcgcctgccgcggccacgacgacctgctgcgcgtgtgtgacgactacgacgtgagccgcgacgagttcttcttcgaccgcagcccgtgcgccttccgcgccatcgtggcgcttttgcgcgcagggaagctgcgactgctgcggggcccgtgcgcgctggccttccgcgacgagctggcctactggggcatcgacgaggcgcgcctggagcgctgctgcctgcgccgcctgcgccgccgcgaggaggaggcggccgaggcccgcgcggggccgacggagcgcggggcgcaggggagcccggcgcgcgccctgggacctcgggggcggctgcagcgcggccggcggcgcctgcgcgacgtggtggacaacccgcactcggggctggcgggcaagctcttcgcctgcgtgtccgtgtccttcgtggccgtcacggccgtgggcctctgcctgagcaccatgccggacatccgcgccgaggaggagcggggcgagtgctcccccaagtgccgcagcctgttcgtgctggagaccgtgtgcgtggcctggttctccttcgagttcctgctgcgctccctgcaggccgagagcaagtgcgccttcctgcgcgcgccactcaacatcattgacatcctggcgctcctgccgttctacgtgtcgctgctgctggggctggcggcaggcccgggcgggaccaagctcctggagcgcgcggggctggtgctgcggctgctgcgtgcgctgcgcgtgctctacgtgatgcgcctggcgcgccactcgctggggctgcgttcgctgggcctgaccatgcgccgctgcgcgcgcgagttcgggctgctgctgctgttcctctgcgtggccatggcgctcttcgcgccactggtgcacctggccgagcgcgagctgggcgcgcgccgcgacttctccagcgtgcccgccagctattggtgggccgtcatctccatgaccaccgtgggctacggcgacatggtcccgcgcagcctgcccgggcaggtggtggcgctcagcagcatcctcagcggcatcctgctcatggccttcccggtcacctccatcttccacaccttttcgcgctcctactccgagctcaaggagcagcagcagcgcgcggccagccccgagccggccctgcaggaggacagcacgcactcggccacagccaccgaggacagctcgcagggccccgacagcgcgggcctggccgacgactccgcggatgcgctgtgggtgcgggcagggcgctga

SEQ ID NO: 80 - protein, 466 aa, Homo sapiens
MEPWPCSPGGGGGTRARHVIINVGGCRVRLAWAALARCPLARLERLRACRGHDDLLRVCDDYDVSRDEFFFDRSPCAFRAIVALLRAGKLRLLRGPCALAFRDELAYWGIDEARLERCCLRRLRRREEEAAEARAGPTERGAQGSPARALGPRGRLQRGRRRLRDVVDNPHSGLAGKLFACVSVSFVAVTAVGLCLSTMPDIRAEEERGECSPKCRSLFVLETVCVAWFSFEFLLRSLQAESKCAFLRAPLNIIDILALLPFYVSLLLGLAAGPGGTKLLERAGLVLRLLRALRVLYVMRLARHSLGLRSLGLTMRRCAREFGLLLLFLCVAMALFAPLVHLAERELGARRDFSSVPASYWWAVISMTTVGYGDMVPRSLPGQVVALSSILSGILLMAFPVTSIFHTFSRSYSELKEQQQRAASPEPALQEDSTHSATATEDSSQGPDSAGLADDSADALWVRAGR

SEQ ID NO: 81 - DNA, 1311 bp, Homo sapiens
atgaccttcgggcgcagcggggcggcctcggtggtgctgaacgtgggcggcgcccggtattcgctgtcccgggagctgctgaaggacttcccgctgcgccgcgtgagccggctgcacggctgccgctccgagcgcgacgtgctcgaggtgtgcgacgactacgaccgcgagcgcaacgagtacttcttcgaccggcactcggaggccttcggcttcatcctgctctacgtgcgcggccacggcaagctgcgcttcgcgccgcggatgtgcgagctctccttctacaacgagatgatctactggggcctggagggcgcgcacctcgagtactgctgccagcgccgcctcgacgaccgcatgtccgacacctacaccttctactcggccgacgagccgggcgtgctgggccgcgacgaggcgcgccccggcggggccgaggcggctccctccaggcgctggctggagcgcatgcggcggaccttcgaggagcccacgtcgtcgctggccgcgcagatcctggctagcgtgtcggtggtgttcgtgatcgtgtccatggtggtgctgtgcgccagcacgttgcccgactggcgcaacgcagccgccgacaaccgcagcctggatgaccggagcaggtactccgccggccctgggagggagccctccgggataattgaagctatctgcataggttggttcactgccgagtgcatcgtgaggttcattgtctccaaaaacaagtgtgagtttgtcaagagacccctgaacatcattgatttactggcaatcacgccgtattacatctctgtgttgatgacagtgtttacaggcgagaactctcaactccagagggctggagtcaccttgagggtacttagaatgatgaggattttttgggtgattaagcttgcccgtcacttcattggtcttcagacactcggtttgactctcaaacgttgctaccgagagatggttatgttacttgtcttcatttgtgttgccatggcaatctttagtgcactttctcagcttcttgaacatgggctggacctggaaacatccaacaaggactttaccagcattcctgctgcctgctggtgggtgattatctctatgactacagttggctatggagatatgtatcctatcacagtgcctggaagaattcttggaggagtttgtgttgtcagtggaattgttctattggcattacctatcacttttatctaccatagctttgtgcagtgttatcatgagctcaagtttagatctgctaggtatagtaggagcctctccactgaattcctgaattaa

SEQ ID NO: 82 - protein, 436 aa, Homo sapiens
MTFGRSGAASVVLNVGGARYSLSRELLKDFPLRRVSRLHGCRSERDVLEVCDDYDRERNEYFFDRHSEAFGFILLYVRGHGKLRFAPRMCELSFYNEMIYWGLEGAHLEYCCQRRLDDRMSDTYTFYSADEPGVLGRDEARPGGAEAAPSRRWLERMRRTFEEPTSSLAAQILASVSVVFVIVSMVVLCASTLPDWRNAAADNRSLDDRSRYSAGPGREPSGIIEAICIGWFTAECIVRFIVSKNKCEFVKRPLNIIDLLAITPYYISVLMTVFTGENSQLQRAGVTLRVLRMMRIFWVIKLARHFIGLQTLGLTLKRCYREMVMLLVFICVAMAIFSALSQLLEHGLDLETSNKDFTSIPAACWWVIISMTTVGYGDMYPITVPGRILGGVCVVSGIVLLALPITFIYHSFVQCYHELKFRSARYSRSLSTEFLN

SEQ ID NO: 83 - DNA, 1560 bp, Homo sapiens
atgcccatgccttccagagacgggggcctgcatcccagacaccaccactatggttcccacagcccttggagtcagctcctgtccagccccatggagacgccgtccatcaagggcctttactaccggagggtgcggaaggtgggtgccctggacgcctccccagtggacctgaagaaggagatcctgatcaacgtggggggcaggaggtatctcctcccctggagcacactggaccggttcccgctgagccgcctgagcaaactcaggctctgtcggagctacgaggagatcgtgcagctctgcgatgattacgacgaggacagccaggagttcttcttcgacaggagccccagcgccttcggggtgatcgtgagcttcctggcggccgggaagctggtgcttctgcaggagatgtgcgcgctgtccttccaggaggagctggcctactggggcatcgaggaggcccacctggagaggtgctgcctgcggaagctgctgaggaagctggaggagctggaggagctggccaagctgcacagggaggacgtactgaggcagcagagggagacccgccgccccgcctcgcactcctcgcgctggggcctgtgcatgaaccggctgcgcgagatggtggaaaacccgcagtccgggctgcccgggaaggtcttcgcttgcctctccatcctcttcgtggccaccacagccgtcagcctgtgtgtcagcaccatgcccgacctcagggcagaggaggaccagggcgaatgctctcggaagtgctactatattttcatcgtggagaccatctgcgtggcctggttctccctggagttctgcctgcggtttgtccaggcccaagacaagtgtcagttcttccaggggcccctgaacatcatcgacatcctggccatctccccatactacgtgtcgctggcggtgtctgaggagcccccggaggacggcgagaggccgagcgggagctcctacctggagaaggtggggctggtcctgcgtgtgctgcgagcgctgcgcatcctctacgtgatgcgcctggctcgccactcgctggggctgcagacgctggggctcaccgtgcgccgttgcacacgtgagttcggcctgctccttctcttcctggccgtggccatcaccctcttctcccctttggtctacgtggccgagaaggagtccgggcgggtgctggagttcaccagcatccccgcctcctattggtgggccatcatctccatgacaacggtgggctacggggacatggtgccccgcagtgtgccaggccagatggtggccctcagcagcatcctgagcgggatcctcatcatggccttcccggccacgtctatcttccacaccttctcccactcctacctggagctcaagaaggagcaggagcagcttcaggcccgcctccgccacctccaaaacaccggtccagccagtgaatgtgaactcctggacccccatgtggccagtgaacatgagctcatgaacgatgtcaatgacctaatcctggagggcccagccttgcctatcatgcacatgtaa

SEQ ID NO: 84 - protein, 519 aa, Homo sapiens
MPMPSRDGGLHPRHHHYGSHSPWSQLLSSPMETPSIKGLYYRRVRKVGALDASPVDLKKEILINVGGRRYLLPWSTLDRFPLSRLSKLRLCRSYEEIVQLCDDYDEDSQEFFFDRSPSAFGVIVSFLAAGKLVLLQEMCALSFQEELAYWGIEEAHLERCCLRKLLRKLEELEELAKLHREDVLRQQRETRRPASHSSRWGLCMNRLREMVENPQSGLPGKVFACLSILFVATTAVSLCVSTMPDLRAEEDQGECSRKCYYIFIVETICVAWFSLEFCLRFVQAQDKCQFFQGPLNIIDILAISPYYVSLAVSEEPPEDGERPSGSSYLEKVGLVLRVLRALRILYVMRLARHSLGLQTLGLTVRRCTREFGLLLLFLAVAITLFSPLVYVAEKESGRVLEFTSIPASYWWAIISMTTVGYGDMVPRSVPGQMVALSSILSGILIMAFPATSIFHTFSHSYLELKKEQEQLQARLRHLQNTGPASECELLDPHVASEHELMNDVNDLILEGPALPIMHM

SEQ ID NO: 85 - DNA, 2942 bp, Homo sapiens
ggtgacaacgtttggaagggccagggcgaccggcagtgtgcacagggactgtgtcgggcttggacctcacctgatcctctctcttagcgcgacccttcctctgctccctgtctcctctttctgccacttgtgcgctgcttccgcgcactcccggctccctagcggcaggaggaggaaggcgcacagcgggtggagagggtgcgccaaggagaggtaaccccttcgggagcccggggaatcccggccgccaccaggggccgtgccaccgccctcgcgggaccaaagcttccggcgtgtccccaactttgtggcgccctcaggccgcggcgactgggttagagatgccttccagcggcagagcgctgctggactcgccgctggacagcggctccctgacctccctggactctagtgtcttctgcagcgagggtgaaggggagcccttggcgctcggggactgcttcacggtcaacgtgggcggcagccgcttcgtgctctcgcagcaggcgctgtcctgcttcccgcacacgcgccttggcaagctggccgtggtggtggcttcctaccgccgccccggggccctggccgccgtgcccagccctctggagctttgcgacgatgccaaccccgtggacaacgagtacttcttcgaccgcagctcgcaggcgttccgatatgtcctgcactactaccgcaccggccgcctgcatgtcatggagcagctgtgcgcgctctccttcctgcaggagatccagtactggggcatcgatgagctcagcatcgattcctgctgcagggacagatacttcagaaggaaagagctgagtgaaactttagacttcaagaaggacacagaagaccaggaaagtcaacatgagagtgaacaggacttctcccaaggaccttgtcccactgttcgccagaagctctggaatatcctggagaaacctggatcttccacagctgcccgtatctttggcgtcatctccattatcttcgtggtggtgtccatcattaacatggccctgatgtcagctgagttaagctggctggacctgcagctgctggaaatcctggagtatgtgtgcattagctggttcaccggggagtttgtcctccgcttcctgtgtgtgcgggacaggtgtcgcttcctaagaaaggtgccaaacatcatagacctccttgccatcttgcccttctacatcactcttctggtagagagcctaagtgggagccagaccacgcaggagctggagaacgtggggcgcattgtccaggtgttgaggctgctcagggctctgcgcatgctaaagctgggcagacattccacaggattacgctcccttgggatgacaatcacccagtgttacgaagaagtcggcctactgctcctatttctatccgtgggaatctctatattttcaactgtagaatactttgctgagcaaagcattcctgacacaaccttcacaagtgtcccttgtgcatggtggtgggccaccacctctatgactactgtgggatatggggacattagaccagacaccaccacaggcaaaatcgtggccttcatgtgtatattatcgggaattcttgtcttggccttgcctattgctattattaacgatcgcttctctgcttgctacttcaccttgaaactcaaggaagcagctgttagacagcgtgaagccctaaagaagcttaccaagaatatagccactgactcatatatcagtgttaacttgagagatgtctatgcccggagtatcatggagatgctgcgactgaaaggcagagaaagagcaagtactaggagcagcgggggagatgatttctggttttgaattaattttcaatttatttacaaaagctatgtacaattaactaaaatgataaagcagtgatgtggatttctgtattctgatgatgagtctcttcagagtactgctcatcttaattaatttttgctgatatattgcttcatctactagaatatttcacatcacctataacaactgcacagtgttctgacacatttgagtgtccaaaatagccaattaacacaaccaaatacaactgggccaatataaacatgtttgaattgtcaaatataaaataatgttattgcaatacatacaaaaaagttaaagattttatgtatcactaacattagaagttttttgcaccactaattttttaaaaatggaaggtaaactgcatagcccagagaaagataagtaaatatttaagaacatattgaacaactttgctatttaaagatattatccaagtacataaattactccgttctctatcagttaaagctattgaatataatacttagctttacaagagaaaacccatatttgatgggcagagattatatccctatcttctttttcatgtaaaccactggtcacaaatgaactgatctctgtatcccattattactataagaggtgggaatcccaaaactgcttagattgcagtacatgagtttacacaaagacttcaacaattgcacatcttcattctcccaactgagtgtagtatgtggagcataaaacagcatattcttagtatttcatgaatatcagatggtctttaaatgtctctttatggatgtattgttcacattatggctttaaaataatgaatatgtaaaagtgaggtagtgaacatcctaaatttctacactggaattactaaataatcttatttcataaaatgggaaatatatgttaaatgacatcactggatgaacttgaagatcttttacttgttaacaaaaaaatactatggacagctttctgattgttggggtaaatagcaaatgttcaaactttgcaggcattttgacattcatcataacaacacaattcctagacattgtattatataattaaagccaaaacctctaaagctaaaaaaaaaaaaaaaaa

SEQ ID NO: 86 - protein, 500 aa, Homo sapiens
MPSSGRALLDSPLDSGSLTSLDSSVFCSEGEGEPLALGDCFTVNVGGSRFVLSQQALSCFPHTRLGKLAVVVASYRRPGALAAVPSPLELCDDANPVDNEYFFDRSSQAFRYVLHYYRTGRLHVMEQLCALSFLQEIQYWGIDELSIDSCCRDRYFRRKELSETLDFKKDTEDQESQHESEQDFSQGPCPTVRQKLWNILEKPGSSTAARIFGVISIIFVVVSIINMALMSAELSWLDLQLLEILEYVCISWFTGEFVLRFLCVRDRCRFLRKVPNIIDLLAILPFYITLLVESLSGSQTTQELENVGRIVQVLRLLRALRMLKLGRHSTGLRSLGMTITQCYEEVGLLLLFLSVGISIFSTVEYFAEQSIPDTTFTSVPCAWWWATTSMTTVGYGDIRPDTTTGKIVAFMCILSGILVLALPIAIINDRFSACYFTLKLKEAAVRQREALKKLTKNIATDSYISVNLRDVYARSIMEMLRLKGRERASTRSSGGDDFWF

SEQ ID NO: 87 - DNA, 1672 bp, Homo sapiens
agccatgctcaaacagagtgagaggagacggtcctggagctacaggccctggaacacgacggagaatgagggcagccaacaccgcaggagcatttgctccctgggtgcccgttccggctcccaggccagcatccacggctggacagagggcaactataactactacatcgaggaagacgaagacggggaggaggaggaccagtggaaggacgacctggcagaagaggaccagcaggcaggggaggtcaccaccgccaagcccgagggccccagcgaccctccggccctgctgtccacgctgaatgtgaacgtgggtggccacagctaccagctggactactgcgagctggccggcttccccaagacgcgcctaggtcgcctggccacctccaccagccgcagccgccagctaagcctgtgcgacgactacgaggagcagacagacgaatacttcttcgaccgcgacccggccgtcttccagctggtctacaatttctacctgtccggggtgctgctggtgctcgacgggctgtgtccgcgccgcttcctggaggagctgggctactggggcgtgcggctcaagtacacgccacgctgctgccgcatctgcttcgaggagcggcgcgacgagctgagcgaacggctcaagatccagcacgagctgcgcgcgcaggcgcaggtcgaggaggcggaggaactcttccgcgacatgcgcttctacggcccgcagcggcgccgcctctggaacctcatggagaagccattctcctcggtggccgccaaggccatcggggtggcgtccagcaccttcgtgctcgtctccgtggtggcgctggcgctcaacaccgtggaggagatgcagcagcactcggggcagggcgagggcggcccagacctgcggcccatcctggagcacgtggagatgctgtgcatgggcttcttcacgctcgagtacctgctgcgcctagcctccacgcccgacctgaggcgcttcgcgcgcagcgccctcaacctggtggacctggtggccatcctgccgctctaccttcagctgctgctcgagtgcttcacgggcgagggccaccaacgcggccagacggtgggcagcgtgggtaaggtgggtcaggtgttgcgcgtcatgcgcctcatgcgcatcttccgcatcctcaagctggcgcgccactccaccggactgcgtgccttcggcttcacgctgcgccagtgctaccagcaggtgggctgcctgctgctcttcatcgccatgggcatcttcactttctctgcggctgtctactctgtggagcacgatgtgcccagcaccaacttcactaccatcccccactcctggtggtgggccgcggtgagcatctccaccgtgggctacggagacatgtacccagagacccacctgggcaggttttttgccttcctctgcattgcttttgggatcattctcaacgggatgcccatttccatcctctacaacaagttttctgattactacagcaagctgaaggcttatgagtataccaccatacgcagggagaggggagaggtgaacttcatgcagagagccagaaagaagatagctgagtgtttgcttggaagcaacccacagctcaccccaagacaagagaattagtattttataggacatgtggctggtagattc

SEQ ID NO: 88 - protein, 545 aa, Homo sapiens
MLKQSERRRSWSYRPWNTTENEGSQHRRSICSLGARSGSQASIHGWTEGNYNYYIEEDEDGEEEDQWKDDLAEEDQQAGEVTTAKPEGPSDPPALLSTLNVNVGGHSYQLDYCELAGFPKTRLGRLATSTSRSRQLSLCDDYEEQTDEYFFDRDPAVFQLVYNFYLSGVLLVLDGLCPRRFLEELGYWGVRLKYTPRCCRICFEERRDELSERLKIQHELRAQAQVEEAEELFRDMRFYGPQRRRLWNLMEKPFSSVAAKAIGVASSTFVLVSVVALALNTVEEMQQHSGQGEGGPDLRPILEHVEMLCMGFFTLEYLLRLASTPDLRRFARSALNLVDLVAILPLYLQLLLECFTGEGHQRGQTVGSVGKVGQVLRVMRLMRIFRILKLARHSTGLRAFGFTLRQCYQQVGCLLLFIAMGIFTFSAAVYSVEHDVPSTNFTTIPHSWWWAAVSISTVGYGDMYPETHLGRFFAFLCIAFGIILNGMPISILYNKFSDYYSKLKAYEYTTIRRERGEVNFMQRARKKIAECLLGSNPQLTPRQEN

SEQ ID NO: 89 - DNA, 4603 bp, Homo sapiens
attacaggtgtgaccgcgcctgtaatcccggcacggacgcgtgggcagcgatcgatgcggccttcagccgcgggggactaggcaaggaagaaggaaggagagggcagcggggccgcctgcagcaggaggctcggcggggccggcggggcagaggcgagaccgagtatagccagcggctcccagcctcggtggctttgggacagacacgcgaggcgcccgggaggtgccaccacaggtggagatccaagtggaggtgggagcggagctacatcacacgtttattgtgcattgattatgtgccagggaccatgctgccgataaacaccttgcatcatttaattctctgagcctctcctggaaagtatgatgctacccggttccacagacagggaaacaagcccagagagggcgacgaatgcactcaaggacagcagctagtgatgctgatgctgctggtccggggaacacactatgagaacctccggtctaaagtggtgctgccaacacccctaggagggaggagcactgaaacctttgtgagcgagttcccgggccccgacaccgggatccgctggcggcgaagcgacgaggcgctgcgcgtgaacgtgggtggcgtgcggcggcagctgagcgcgcgcgccctggcgcgcttcccgggcacgcggctgggccgcctgcaggccgcggcgtcggaggagcaggcgcggcgcctgtgcgacgactacgacgaggcggcgcgcgaattctacttcgaccggcacccgggcttcttcctgagcctgctgcacttctaccgcactggccacctgcacgtgctcgacgagctgtgcgtcttcgcctttggccaggaggccgactactggggcctaggcgagaacgcgcttgccgcgtgctgccgcgcgcgctacctggagaggcggctgacccagccgcacgcctgggacgaggacagcgacacgccgagcagcgtggacccgtgccccgacgagatctccgacgtgcagcgagaactggcgcgctatggcgcggcgcgctgtggccgcctgcgccgccgcctctggctgaccatggagaacccgggctactcgctgccgagcaagctcttcagctgcgtctccatcagcgtggtgctcgcctccatcgccgccatgtgcatccacagcctgcccgagtaccaggcccgcgaggcggcggccgccgtggctgcggtggccgcgggccgcagcccggaaggcgtgcgcgacgacccggtgctgcgacgcctcgagtacttctgcatcgcctggttcagcttcgaggtgtcgtcgcgcctcctgctggcgcccagtacgcgcaacttcttctgccacccgctcaacctcatcgacattgtgtctgtgctgcccttctatctcacgctgctggctggtgtggcactgggcgaccagggcggcaaggagttcggccacctgggcaaggtggtgcaggtgttccgcctcatgcgcatcttccgcgtactcaagttggcgcgccattccaccgggctgcgctcgctgggagccacgctcaagcacagctaccgtgaggtgggcatcttgctgctgtacctggctgtgggtgtgtcagtgttctctggtgtggcctacacagctgaaaaggaggaggacgtgggctttaacaccatcccagcctgctggtggtggggcacagtgagcatgaccaccgtgggctatggggatgtggtgccagtgacggtggctggcaagctggcagcctcaggctgcatcctagggggcatcctggtggtagcactccccatcaccatcatcttcaacaagttctcccacttctaccggcgccagaaggctctggaggcagccgtgcgcaacagcaaccaccaagagtttgaggacttgctgagcagcattgatggggtgtcggaggcatctctggagacatcccgagaaacctctcaggagggacagtctgcagatctagagagccaggcccccagtgagcctccacaccctcagatgtattaaaaccagggatccgtgaccccctgccatgcccctacagtagagattcctcccctgctaaagttcttcatggtagtgagcctcccaggatcactcatgctgtcctgagaaatgagattcaaaagctgcattccttcctccaaaggcccaggacaggacagtgctaccctagattctgtgagattctgcaagcaactcagaaagctttataaacctgcctccaagccattcatgaagcaggcatgaagccagaggggaggaagttgaaaggatactaatgattcctgagcacctcctgtacatgaaccaggtcatgtttggccttgtgttggagaaagagaattatccccacttcacagatgaggaaaccaaggctaagagatgagcgatgcctctcccagatgtcacaattagaagtggcagagtcaggtttggaatctgggcttgttggtgtgcctggagcaatgctccatcaactccatctttcttctgccctcatgaagtttgcgtgtgttttttggtgattcatggatccccagagttgatccacaagataagaaatccctttcagagccaggggaagggtccagacaggagatttggatataggagctctggatctcagctgtggttcctttctaggagcatccaacaggagtcagcaatcaaagatgagtcctggagggaaggaggatgagtcctgggaggaagtaccatagcattgtacttgcctctttagctggtatgcaagatttgctaagcaataatcttccgaccttcctcccagggctgatgtgagagaaagaaaatctgaagggcccctggcctgagatctagacaacctagctgcgccaagacctgctgtgtaaagtggtccaatccctgcccccaagtccagattccagcccctctgtcaaatggtcagaatctgtgacccagaaggcaatgaaagccaaggagagcagaggggtctctaacttaaagccagctcagctctgaaatgttcagagggctgacatatatgaatactggcttctaagaccctcccccaacagtctgaccttggcagttcctttctgcccatcacacagacgtccagccctacattgtccagccctacctagagtacccatccaggcccatgtgtgagagtcctctcccttctggccagctccagccccctcacccttgctgggggcatatctctcatacccacctgctgaatcttctcttcacttgctgagaaagtcagaggaggggatccagtagccctttccacatactgtggctacagcacccagcactgtgctgttgttgtctgactgtggctatctctgtcccatcaccctgagcctcaagatggaagacattgtctgcttgaactctgggcttggtgcagagtaggtatttggtaaatgttgaatagatcaaccaattcctacagcccactgggtgccaagctcagagggggaaaaaaagatagccagagagagacctggacctcaaaaaggtgtgaacaagactgaaaaggaggtccgttcagctccgcctgccctgtccctgcttggttcttgaagtttttacaatatattccttgtaggttcttcactcactcactcaacaaatacccgttggaagagtcttaaactggggcttcatgtgtggcctgcagtcatgtttcggcttagtccaacagtgtttttattatattttaagaatctgaatgcctttgcgtgaggcatgcactctcaggttccccatagtgtctcccccgctgccacccacaaacagacacacatgccgttgtgttatgcccagccactctgatatactggcttctgacttatgggctgcttactagtctcaagagatacagtggtggaaaaatatatccctatactcatgaagcttaccgactagtagggaagatagactctaatgcaataatcacataaatatagcgagctctactaagtacaggtgtgtataatgtatcagggaccatggcccgagaaagtgagaaagctttcctgagcaagtgacaatctaacctgccatccaaatgataaattgctaattaagcaaatgaggttccaggggggagtactccaagcagagagaatggcatgtgtgaaggtgtgtgtcatacacagggcctagtacatagtgggccccctacatacgcatggattctgggtctccagattggaacagaggatggagctaagcagcaaagggcctcccttgaattcaccacacacataccagcccttctgcacactttgctccttacatctaggcccagctgaacccaggttaggggcagatcagaagggctgcgtgtagcacccttatggtcttgcagaacacaccaagaaacccgacggcttccatattttctgaccctacaaacaggtccctaatactgatgtggagaaagctcaagagggaatcatctggcctgagcctaccatgaggctgtttgtggttcctggcagaaaagcaacaactcgctccccttcccatgtatcagtgaaaaccattatgcaaataaagagctggcccccgaaaaaaaaaaaaaaaaa

SEQ ID NO: 90 - protein, 526 aa, Homo sapiens
MLMLLVRGTHYENLRSKVVLPTPLGGRSTETFVSEFPGPDTGIRWRRSDEALRVNVGGVRRQLSARALARFPGTRLGRLQAAASEEQARRLCDDYDEAAREFYFDRHPGFFLSLLHFYRTGHLHVLDELCVFAFGQEADYWGLGENALAACCRARYLERRLTQPHAWDEDSDTPSSVDPCPDEISDVQRELARYGAARCGRLRRRLWLTMENPGYSLPSKLFSCVSISVVLASIAAMCIHSLPEYQAREAAAAVAAVAAGRSPEGVRDDPVLRRLEYFCIAWFSFEVSSRLLLAPSTRNFFCHPLNLIDIVSVLPFYLTLLAGVALGDQGGKEFGHLGKVVQVFRLMRIFRVLKLARHSTGLRSLGATLKHSYREVGILLLYLAVGVSVFSGVAYTAEKEEDVGFNTIPACWWWGTVSMTTVGYGDVVPVTVAGKLAASGCILGGILVVALPITIIFNKFSHFYRRQKALEAAVRNSNHQEFEDLLSSIDGVSEASLETSRETSQEGQSADLESQAPSEPPHPQMY

SEQ ID NO: 91 - DNA, 5027 bp, Homo sapiens
cacactcgcacccgcgcacgcaccgccagcaggcagcggccaccgccgcgatgctcgcccgcgggttggggaagtttcccgccggcctcggccgcgggcacccgtgctcccaggtgtagcgcccccgcgcggcgcgggcggccggcgcctccagcatgaccggccagagcctgtgggacgtgtcggaggctaacgtcgaggacggggagatccgcatcaatgtgggcggcttcaagaggaggctgcgctcgcacacgctgctgcgcttccccgagacgcgcctgggccgcttgctgctctgccactcgcgcgaggccattctggagctctgcgatgactacgacgacgtccagcgggagttctacttcgaccgcaaccctgagctcttcccctacgtgctgcatttctatcacaccggcaagcttcacgtcatggctgagctatgtgtcttctccttcagccaggagatcgagtactggggcatcaacgagttcttcattgactcctgctgcagctacagctaccatggccgcaaagtagagcccgagcaggagaagtgggacgagcagagtgaccaggagagcaccacgtcttccttcgatgagatccttgccttctacaacgacgcctccaagttcgatgggcagcccctcggcaacttccgcaggcagctgtggctggcgctggacaaccccggctactcagtgctgagcagggtcttcagcatcctgtccatcctggtggtgatggggtccatcatcaccatgtgcctcaatagcctgcccgatttccaaatccctgacagccagggcaaccctggcgaggaccctaggttcgaaatcgtggagcactttggcattgcctggttcacatttgagctggtggccaggtttgctgtggcccctgacttcctcaagttcttcaagaatgccctaaaccttattgacctcatgtccatcgtccccttttacatcactctggtggtgaacctggtggtggagagcacacctactttagccaacttgggcagggtggcccaggtcctgaggctgatgcggatcttccgcatcttaaagctggccaggcactccactggcctccgctccctgggggccactttgaaatacagctacaaagaagtagggctgctcttgctctacctctccgtggggatttccatcttctccgtggtggcctacaccattgaaaaggaggagaacgagggcctggccaccatccctgcctgctggtggtgggctaccgtcagtatgaccacagtggggtacggggatgtggtcccagggaccacggcaggaaagctgactgcctctgcctgcatcttggcaggcatcctcgtggtggtcctgcccatcaccttgatcttcaataagttctcccacttttaccggcgccaaaagcaacttgagagtgccatgcgcagctgtgactttggagatggaatgaaggaggtcccttcggtcaatttaagggactattatgcccataaagttaaatcccttatggcaagcctgacgaacatgagcaggagctcaccaagtgaactcagtttaaatgattccctacgttagccgggaggacttgtcaccctccaccccacattgctgagctgcctcttgtgcctctggcacagcccaggcaccttatggttatggtgtaaggagtatgcccagcccctgaggggagagatgcatgggatatgcacccaggtttcttttacagtttttagaatcgtttttagagggtggtgtgtctgacaccatgcctttgcacctttccatgaaatgacactcactggtctttgcatcgtgggcataaaatgttcacctttttgccagatgagtacacccagaatgctaatttttctgtccatcgtgtacgctattctagtgcttgtggcccagtactgtctatgagttgtcgtgctcctgtttctgaggttgtcgtgtgagttctgtacaaaaagcccccacaagtcgtccagtagaaatgcatctatgaggtcagcaaggatatgatgagattttgctcacagtcatgtgaaaacaaaatctcagctctttatccattgctttcacttagttttagtaccaaaacaaagagaatgcaaagttaagcagacttgaccaatgcaagtctctaagttgtttttataaatgatctgtagttccgtggcttgcatgggtgcaccaatcatctttagaacgatgtacactgatgttcatctcataaatgtcactctttagagaatgttacttagttaaacatgcagtgaagatcgaatttttttcccaagaacagatgtgttagggagaggggcttcagctaaatagtccaaaccctagggtgcttaaagccaagttagtgcaggctgagccccttggttcacagtcaagcctccttgtttcctagggtgactgtagagaaatgtatttccggatgaggtttctgatctaggccatttgaccaaactttgctgtgtctaagatattagcatgtttttgaaatatttattttttaagatgtttaggagtaaggtcgtgttgtcttcctcaactaaaaagaagtttactgttgtatcgtctccctgaggtgaacgttgttgggttgctagcaagggcagtagcttaaatacttttgttgcctactctgaaagctcatcaaatgagagcccttttatttccaagcagaatttagtcagataattttgcttctaggatatagtatgttgtatatgatgctgtgattgccctggagttcctgccatgacatggaaacctggtggtatggaagcatgtactcaaaatatagacgtgcacgatggtggtgtggcttacccaggatggaaacactgcagttcttacttgcattcccactgcctttcatggggggtgactgggtagaggccaggagaaaggaaagagttgtaaaataaaaaactgctagttcataaaatgtcataaaaaattgtaaacttgaaaagcttaatgctattcaaaagaccttcaagcttccaaacttgtattgaagggagacgactgtttcctcctccaaaatgctcctgctcctcttgttcggttaaccagcacataacattgtgatggggaacctgggttcctctataagataattcttctccatcatctttaaggtaatctgatggttttccaggtggctttcattattgttccatctttgaaaaggcaatagaacccaggggtctgagcatggagctatccagggttttcatccaaaggttgggcctcttcttaagaggtccttttgtgtttcagttgattgaagatgatacttacctcattggaggtgtggcaaggatcttatcagaaggctttgtgttcttgtagttgtcatggctactacagtgtgggtgatttattgaatgaattcactagccacttgtgtcctggagcccccagttcaaatctttccattggactggaggcttgtgggaggctgggaggtggctgtctcctagtgtctacatccgtgtctctgaagcatcaggaaaagtgagatgacttagaggcaactgggcactgaatcagaggagcagagttatttttcagaatttgcacatggaacacttagatttggctggtgcttccagccctggaaggcataacatttacggactcatccccagctgcactgaaggcaggtggtggtacagacttatgaggacggatcagtttgccaaggctgatggtattgggtcactgagcctggtatccatggccgctgaccaggaagcttatgcaaagtggaagcaaggaacaaggcagaataactcagtcactttcatgaagatttttctaaacaagaaggcttaccaccaaaaaagaggtaccctagtggttaccctttgcagatgtgaaagctggaaaacttgacttttctttttggtaatgacttgcatttatctggtgcctttcgttggaggaatcccaacgtgctttagagactatctttttaacatctcttgtacatacatatatacttatataaaatattatcttgcccaactggacctttactcacttctgagcatgagaatgtcccaatagcattgagtttttcaagtggtggtttcagataagtgggagaaagaacaacccggctggcttaaaccctggagctaattcccacaaggaatgtagactgaatggtgacccagggagaaataatcttcctctcccctaaagtctcactaaggtttgaagtttacaggtgctctccactgggtctttgatcgaccttgctagataacatctaactaaaagcagtttcttttagtccctgaagctaaccagggagagtcaggttaattttctgtaaaaatatgaggtgacatctttggcaaccaggctgtcagactgacctgtaaacctcctttagggggacagagtagaaactggagatgacttgtttccagctgtgagcttgagagaagtgtcactcccagcatttgaaggttattgttttcaatgccagtgggccaaatatatgggccaggctttgatatctgtgatgtgcattttggaagtgctgggttgggaagtgacacgtctgttgcacaaatgcatattggttataggtttgtgttttctgccaaacccccacatttctcgggtttgtgagtgaggaagggcatgttgtaatgccaagctgatttgtagctcgtaaggtagtaattggtatttaacatttgcatttgttatttctacttatcttagcactcaaataattgaactacctgctaattcttgccgcatttcaaagaaaataagttgttatgcactttgggatagtggtgatctgtacaggctgtgtgttagctacttgaaggcgtaactggtatttcttgtgtgttttaacagcatgacttcttacagagctgtaatttttaaaattgaggatgccatatttgagatgtcagttttaacactcattaacacactactgtgcaagcattgacacaggctgcactg

SEQ ID NO: 92 - protein, 489 aa, Homo sapiens
RPRAARAAGASSMTGQSLWDVSEANVEDGEIRINVGGFKRRLRSHTLLRFPETRLGRLLLCHSREAILELCDDYDDVQREFYFDRNPELFPYVLHFYHTGKLHVMAELCVFSFSQEIEYWGINEFFIDSCCSYSYHGRKVEPEQEKWDEQSDQESTTSSFDEILAFYNDASKFDGQPLGNFRRQLWLALDNPGYSVLSRVFSILSILVVMGSIITMCLNSLPDFQIPDSQGNPGEDPRFEIVEHFGIAWFTFELVARFAVAPDFLKFFKNALNLIDLMSIVPFYITLVVNLVVESTPTLANLGRVAQVLRLMRIFRILKLARHSTGLRSLGATLKYSYKEVGLLLLYLSVGISIFSVVAYTIEKEENEGLATIPACWWWATVSMTTVGYGDVVPGTTAGKLTASACILAGILVVVLPITLIFNKFSHFYRRQKQLESAMRSCDFGDGMKEVPSVNLRDYYAHKVKSLMASLTNMSRSSPSELSLNDSLR

SEQ ID NO: 93 - DNA, 2097 bp, Homo sapiens
agcttcttggatgatgatggacgtcccaccgggcaggatgaaggcagagcgtgtggcatctccacctcaagggtgcagcctgatcttcctcttctcccttgccagccagcactctgccttctgtatccaccatggtgtttggtgagtttttccatcgccctggacaagacgaggaacttgtcaacctgaatgtggggggctttaagcagtctgttgaccaaagcaccctcctgcggtttcctcacaccagactggggaagctgcttacttgccattctgaagaggccattctggagctgtgtgatgattacagtgtggccgataaggaatactactttgatcggaatccctccttgttcagatatgttttgaatttttattacacggggaagctgcatgtcatggaggagctgtgcgtattctcattctgccaggagatcgagtactggggcatcaacgagctcttcattgattcttgctgcagcaatcgctaccaggaacgcaaggaggaaaaccacgagaaggactgggaccagaaaagccatgatgtgagtaccgactcctcgtttgaagagtcgtctctgtttgagaaagagctggagaagtttgacacactgcgatttggtcagctccggaagaaaatctggattagaatggagaatccagcgtactgcctgtccgctaagcttatcgctatctcctccttgagcgtggtgctggcctccatcgtggccatgtgcgttcacagcatgtcggagttccagaatgaggatggagaagtggatgatccggtgctggaaggagtggagatcgcgtgcattgcctggttcaccggggagcttgccgtccggctggctgccgctccttgtcaaaagaaattctggaaaaaccctctgaacatcattgactttgtctctattattcccttctatgccacgttggctgtagacaccaaggaggaagagagtgaggatattgagaacatgggcaaggtggtccagatcctacggcttatgaggattttccgaattctaaagcttgcccggcactcggtaggacttcggtctttaggtgccacactgagacacagctaccatgaagttgggcttctgcttctcttcctctctgtgggcatttccattttctctgtgcttatctactccgtggagaaagatgaccacacatccagcctcaccagcatccccatctgctggtggtgggccaccatcagcatgacaactgtgggctatggagacacccacccggtcaccttggcgggaaagctcatcgccagcacatgcatcatctgtggcatcttggtggtggcccttcccatcaccatcatcttcaacaagttttccaagtactaccagaagcaaaaggacattgatgtggaccagtgcagtgaggatgcaccagagaagtgtcatgagctaccttactttaacattagggatatatatgcacagcggatgcacgccttcattaccagtctctcttctgtaggcattgtggtgagcgatcctgactccacagatgcttcaagcattgaagacaatgaggacatttgtaacaccacctccttggagaattgcacagcaaaatgagcgggggtgtttgtgcctgtttctcttatcctttcccaacattaggttaacacagctttataaacctcagtgggttcgttaaaatcatttaattctcagggtgtacctttccagccatagttggacattcattgctgaattctgaaatgatagaattgtctttatttttctctgtgaggtcaattaaatgccttgttctgaaatttattttttacaagagagagttgtgatatagtttggaatataagataaatggtattgggtggggtttgtggctacagcttatgcatcattctgtgtttgtcatttactcacattgagctaactttaaattactgacaagtagaatcaaaggtgcagctgactgagacgacatgcatgtaagatccacaaaatgagacaatgcatgtaaatccatgctcatgttctaaacatggaaactaggagcctaataaacttcctaattcagtacgaaaaaaaaaaaaaaaaa

SEQ ID NO: 94 - protein, 491 aa, Homo sapiens
MVFGEFFHRPGQDEELVNLNVGGFKQSVDQSTLLRFPHTRLGKLLTCHSEEAILELCDDYSVADKEYYFDRNPSLFRYVLNFYYTGKLHVMEELCVFSFCQEIEYWGINELFIDSCCSNRYQERKEENHEKDWDQKSHDVSTDSSFEESSLFEKELEKFDTLRFGQLRKKIWIRMENPAYCLSAKLIAISSLSVVLASIVAMCVHSMSEFQNEDGEVDDPVLEGVEIACIAWFTGELAVRLAAAPCQKKFWKNPLNIIDFVSIIPFYATLAVDTKEEESEDIENMGKVVQILRLMRIFRILKLARHSVGLRSLGATLRHSYHEVGLLLLFLSVGISIFSVLIYSVEKDDHTSSLTSIPICWWWATISMTTVGYGDTHPVTLAGKLIASTCIICGILVVALPITIIFNKFSKYYQKQKDIDVDQCSEDAPEKCHELPYFNIRDIYAQRMHAFITSLSSVGIVVSDPDSTDASSIEDNEDICNTTSLENCTAK

SEQ ID NO: 95 - DNA, 2620 bp, Homo sapiens
agggaccgtgcgctgcctggggaagcaatgcaagtctccatagcctgcacagagcacaatttgaagagtcggaatggtgaggaccgacttctgagcaagcagagctccaccgcccccaatgtggtgaacgcagcccgggccaaattccgcacggtcgctatcatcgcgcgcagcctggggacgttcacgcctcagcatcacatttctctcaaagagtccaccgcaaagcagactggcatgaaatataggaatcttggaaaatcaggactcagagtttcttgcttgggtcttggaacatgggtgacatttggaggtcaaatttcagatgaggttgctgaacggctgatgaccatcgcctatgaaagtggtgttaacctctttgatactgccgaagtctatgctgctggaaaggctgaagtgattctggggagcatcatcaagaagaaaggctggaggaggtccagtctggtcataacaaccaaactctactggggtggaaaagctgaaacagaaagagggctgtcaagaaagcatattattgaaggattgaagggctccctccagaggctgcagctcgagtatgtggatgtggtctttgcaaatcgaccggacagtaacactcccatggaagaaattgtccgagccatgacacatgtgataaaccaaggcatggcgatgtactggggcacctcgagatggagtgctatggagatcatggaagcctattctgtagcaagacagttcaatatgatcccaccggtctgtgaacaagctgagtaccatcttttccagagagagaaagtggaggtccagctgccagagctctaccacaaaataggtgttggcgcaatgacatggtctccacttgcctgtggaatcatctcaggaaaatacggaaacggggtgcctgaaagttccagggcttcactgaagtgctaccagtggttgaaagaaagaattgtaagtgaagaagggagaaaacagcaaaacaagctaaaagacctttccccaattgcggagcgtctgggatgcacactacctcagctagctgttgcgtggtgcctgagaaatgaaggtgtgagttctgtgctcctgggatcatccactcctgaacaactcattgaaaaccttggtgccattcaggttctcccaaagatgacatcacatgtggtaaatgagattgataacatactgcgcaacaagccctacagcaagaaggactatagatcataaggcaatgcatgaaccacagaagctgcatggttaaaatagcggcctgtgcccagtacagaaaggtgttactaaccagtcttttgaatcacttagcagcttgctcgtcaacctctagtgtccctccctggattctttgaggtgtctgctgtcgctaccactgtgcacatctgaaaactcacaaccaagaaaatccattctattttcttatcttggactggagtcacctattcttgcattgctgtatacacctcatgcttatgcaatgggaagaatatgggggccagggggtgtggtactaccttcaggcatttggtaactcaaagaaggctgtacagatatattttttcaaaaagaacaaaatccacagatgcaatgtgagttgcgtaagaaacagagtagatagactaaattcagtgaaggaaaggaattgagagatttttcttagtaaatagattattgttaagtaaatagttattaaaaatatatctcactgcaaaaaaaaaaaaagcagtatcttcactcaaaagtcttgcttggaagaataagcagaaagaattttatatattttttttctattttcacattcatactaacaagttttgttccatttgttattcaataaaacaaaaatttctaggtatttgctttattacctttcaaatatttactgttgcttggccccaagaatggccttgtacaacttatccagaatgtctattaggattctaatgttatgtccacttacaagtagagacagtaaaaggatgaatacccaatctttagtgacaatgcagctgatttatgaaagagagggctacactgctatggaaacttagcttcaaagaaaatgcaatgtatctgcaattaggtgttcattttttactacattttattaaaacctgctttatactttcaactgcttgtaggcacaacttctgcaagtttaaatatttgagctttacaaataaacatacacatgctgttttttaagtaaacctgtaaaatacccaggaaggcaaatgttcattgtttaattagcactgggattttataatataatgtttggtatttttgaggcattgttaacatgaaagtcaaccactggctttgtgaaaaatgctatgtcactattcagaatatgctgggtaaattaacttgcctagtgaaaagcaaaatgttaaagaaagaacttctggttctataatcatattatatgcactaaactatatgcatgaaagttctttgcatggattaatggggcttacccttgttgcactcgaaatctgaggtgtatctagccctgccactattggctacttaccctcattaatatcccacttgagaaaaattgtgagactatactgtgtcaatatctgtaaaaagagag

SEQ ID NO: 96 - protein, 401 aa, Homo sapiens
MQVSIACTEHNLKSRNGEDRLLSKQSSTAPNVVNAARAKFRTVAIIARSLGTFTPQHHISLKESTAKQTGMKYRNLGKSGLRVSCLGLGTWVTFGGQISDEVAERLMTIAYESGVNLFDTAEVYAAGKAEVILGSIIKKKGWRRSSLVITTKLYWGGKAETERGLSRKHIIEGLKGSLQRLQLEYVDVVFANRPDSNTPMEEIVRAMTHVINQGMAMYWGTSRWSAMEIMEAYSVARQFNMIPPVCEQAEYHLFQREKVEVQLPELYHKIGVGAMTWSPLACGIISGKYGNGVPESSRASLKCYQWLKERIVSEEGRKQQNKLKDLSPIAERLGCTLPQLAVAWCLRNEGVSSVLLGSSTPEQLIENLGAIQVLPKMTSHVVNEIDNILRNKPYSKKDYRS

SEQ ID NO: 97 - DNA, 3019 bp, Homo sapiens
  modified_base (1334): a, c, t, g, unknown or other
caccgagcaagtctggataagtgaggctggctccatgtatccagaatcaacgacgggctccccggctcggctctcgctgcggcagacgggctcccccgggatgatctacagtactcggtatgggagtcccaaaagacagctccagttttacaggaacctgggcaagtctggcctgcgggtctcctgcctgggacttggaacatgggtgaccttcggaggccagatcaccgatgagatggcagagcagctcatgaccttggcctatgataatggcatcaacctcttcgatacagcagaagtctacgcagccggcaaggctgaagtggtactgggaaacatcattaagaagaaaggatggaggcggtccagcctcgtcatcaccaccaagatcttctggggcggaaaggcggagacggagcggggcctgtccaggaagcacataatcgaaggtctgaaagcttccctggagcgactgcagctggagtacgtggatgtggtgtttgccaaccgcccggaccccaacaccccgatggaagagaccgtccgcgccatgacccacgtcatcaaccaggggatggccatgtactggggcacgtcacgctggagctccatggagatcatggaggcctactccgtggcccggcagttcaacctgaccccgcccatctgcgagcaggctgagtaccacatgttccagcgtgagaaagtggaggtgcagctgccggagctgttccacaagataggagtgggcgccatgacctggtcccctctggcctgtggcattgtttctggcaagtacgacagtggcatcccaccctactcaagagcctccttgaagggctaccagtggctgaaggacaagatcctcagtgaggagggccggcgccagcaagccaagctgaaggagctgcaggccatcgccgagcgcctgggctgcaccctgccccagctggccatagcctggtgcctgaggaatgagggagtcagctccgtgctcctgggggcctccaatgcggaccagctcatggagaacattggggcaatacaggtccttccgaaactgtcgtcttccattatccacgagattgatagtattttgggcaataaaccctacagcaaaaaggactacagatcctaagccgcccccgcccgcctgctcggacagtttccgttccctcctagtctctgttcgctcgcttaagctgttttgaagcaagtgaagagtgtggtttgcatccaagagaaaacaccacactgtgatgtcatcgggaaatgatctcccaagtcgctgccagacaccacccactgcttcgccggacaatgtcgaagtccantctgtgccggggaaggcactggttaggaaggatgttcaaacggtcccacccaagcctgtcacctctgctcatcctccaagaccacccagctttttcccagccacagccaagattcccaaagtcaaggcccaaagatttccaaggttcccaaagtcaaggccaggccaaggcctggttgggtccttggggcgggcagggccggcctctcctctgctgagaatccccacttggtgtagggggagagggaaagggtctggcccatcgagggcccctttctgccaggcccttggttgctggggcaggcctccccactgggggtcttcctccacctcccactttccaagggctccaggaatctggggcctgaccacagattcctctcccatccttttctgctccaacctgccccactgggtcacggcaggggccatgcctaccaagctcgagctggcccttgacccccacccacccccacccttgctggcaggggcagggaccccagggggattgactctgcagtttgggagccacaaaaagcgtagcggtcgtgatttctagctcagcctcccaccgtcttcctcctacacaccaatgatgagcctcatgccagtgaggcccggagcgcttgggaggggtcccagtggggcaggcccctctgtctggccacccctctgtcctggccccggaaggccctgtggtcatgtgctcctagctgcacggtggctgctggcacaccacggcaagtggcagcaggggcggcctgtgcacaaggatgcactcctctcggccctgtagaatttctctaaagccgcccgccagcccaggccgctgctctgcaccgagctggtgggcttgggttttgtggagcgcatgcttggaccctttcagtaaggaagggtctttgggattttctgtgcccatgacttgggggctgcacccccacagcacccccacaatgtaggaaaagacctcagggaacctctccctggaaagacgggcagggctggttagcccctcccactgcctgacacctgggacaggctgggcagaggggagagagggcaggacaggccagagtgacgcccccgtgcagcttgggccggagggcaagggatgccagtaagtctgcaggtgcggggtgccacctacaggcccaggcctgtgtcccaagcagtacccaggctttgcagaccacgcggggcagggctccactgaagccacccccacccctcgccagctagctccatagggaagcctgtgtctcctgcccccagggcgcaccctcagtgcaggcacctctgttcccgctttgcccctggaggagccactattccagaaggctccaccctgccgtcctgcgggagactgctgtccagtcctggccgggccaaggcctgggaaactgtgaaagtcagaaaggccagcggggagagcctggggcgaggggaggagggggatcagcttctgctattaccgaccccacttcatgctgcacctggcgcctagaactcttgcccctcctcatagaccaagtcccgggggtctccactcagtcctgctgcctgcttcaccagaagcagccctgtgagtgtggggtggggaagtcccttcccaacggaggtcccagcctatgccctgggcccaggtgggggtcgcctgcttccttcccggacagggtcctgcag

SEQ ID NO: 98 - protein, 367 aa, Homo sapiens
MYPESTTGSPARLSLRQTGSPGMIYSTRYGSPKRQLQFYRNLGKSGLRVSCLGLGTWVTFGGQITDEMAEQLMTLAYDNGINLFDTAEVYAAGKAEVVLGNIIKKKGWRRSSLVITTKIFWGGKAETERGLSRKHIIEGLKASLERLQLEYVDVVFANRPDPNTPMEETVRAMTHVINQGMAMYWGTSRWSSMEIMEAYSVARQFNLTPPICEQAEYHMFQREKVEVQLPELFHKIGVGAMTWSPLACGIVSGKYDSGIPPYSRASLKGYQWLKDKILSEEGRRQQAKLKELQAIAERLGCTLPQLAIAWCLRNEGVSSVLLGASNADQLMENIGAIQVLPKLSSSIIHEIDSILGNKPYSKKDYRS

SEQ ID NO: 99 - DNA, 1215 bp, Homo sapiens
atgcaggtgtctatcgcgtgtaccgagcagaaccttcgcagccggagcagtgaggaccgtctgtgtggaccccggccgggccccggaggcggtaatggtgggccggccgggggggggcacgggaatcctccggggggtggagggtctggccccaaggcccgagctgcagtggttcccggacccccagcgcccggtggggccgtccgagagagcaccggccgaggcactggcatgaaatacaggaacctagggaagtgtggtgttcgggtatcctgtcttggcctaggtacctgggtcacatttggttctcagatctcagatgagacagcagaggatgtgctgactgtagcctatgagcatggtgtaaacctgtttgacaccgccgaagtgtacgcagcaggaaaggctgaaagaaccctagggaacatcctcaagagcaaaggttggaggagatcaagctatgtcatcactaccaagattttttggggaggacaggcagaaaccgagcgaggtttaagccgaaagcacatcattgagggcttgcgaggatccctggaacgcctccagctgggatacgtggacattgtctttgccaatcgctcagaccccaactgtcctatggaggagattgtgcgagccatgacctatgtcatcaaccagggcctggccctatactgggggacatcccgatggggggctgcagaaatcatggaggcctactccatggccagacagttcaatctgattcctccagtgtgtgaacaagcggagcaccatctgtttcagagggagaaggtggagatgcagctgccagagctctaccacaagattggagttggatcagtcacttggtaccctctagcctgtggtctcattactagcaagtatgatgggcgagtcccagatacttgcagggcctccatcaagggctaccagtggctcaaggacaaagtgcagagtgaagatggcaagaagcaacaagccaaagtcatggaccttcttcctgtcgctcaccagctgggctgcaccgtggcccagcttgctattgcgtggtgtctccgcagtgagggtgtcagctctgtcttgctgggggtgtcgagtgcggagcagttgatagaacacctgggcgcgctacaggtgctgagccagctgaccccgcagacagtgatggaaatagacgggctcctgggaaacaagccgcattccaagaagtag

SEQ ID NO: 100 - protein, 404 aa, Homo sapiens [sequence omitted]

SEQ ID NO: 101 - DNA, 408 bp, Homo sapiens
ggaaccttaatgcccaggatgatcctgtctaacaccacagcggtgacgccctttctgaccaagctgtggcaggagacagttcagcagggtggcaacatgtcgggcctggcccgcaggtccccccgcagcggtgacggcaagctggaggccctctacgtcctcatggtactgggattcttcggcttcttcaccctgggcatcatgctgagctacatccgctccaagaagctggagcactcgaacgacccattcaacgtctacatcgagtccgatgcctggcaagagaaggacaaggcctatgtccaggcccgggtcctggagagctacaggtcgtgctatgtcgttgaaaaccatctggccatagaacaacccaacacacaccttcctgagacgaagccttccccatga

SEQ ID NO: 102 - protein, 129 aa, Homo sapiens [sequence omitted]

SEQ ID NO: 103 - DNA, 732 bp, Homo sapiens
caaatccagaaaagatccgttttcctaaccttgttcgcctattttattatttaaattgcagcaggagggaagcatgtctactttatccaatttcacacagacgctggaagacgtcttccgaaggatttttattacttatatggacaattggcgccagaacacaacagctgagcaagaggccctccaagccaaagttgatgctgagaacttctactatgtcatcctgtacctcatggtgatgattggaatgttctctttcatcatcgtggccatcctggtgagcactgtgaaatccaagagacgggaacactccaatgacccctaccaccagtacattgtagaggactggcaggaaaagtacaagagccaaatcttgaatctagaagaatcgaaggccaccatccatgagaacattggtgcggctgggttcaaaatgtccccctgataagggagaaaggcaccaagctaacatctgacgtccagacatgaagagatgccagtgccacgaggcaaatccaaattgtctttgcttagaagaaagtgagttccttgctctttgttgagaattttcatggagattatgtggttggccaataaagatagatgacatttcaatctcagtgatttatgcttgcttgttggagcaatattttgtgctgaagacctcttttactttccgggcaagtgaatgtcattttaatcaatatcaatgatgaaaataaagccaaattt

SEQ ID NO: 104 - protein, 123 aa, Homo sapiens
MSTLSNFTQTLEDVFRRIFITYMDNWRQNTTAEQEALQAKVDAENFYYVILYLMVMIGMFSFIIVAILVSTVKSKRREHSNDPYHQYIVEDWQEKYKSQILNLEESKATIHENIGAAGFKMSP

SEQ ID NO: 105 - DNA, 492 bp, Homo sapiens
aaagggactccttgaaactgattgagagcccagtggatttgccagcagtttgagcttctaccgagtcttcccccacctcaatccctgttgctatggagactaccaatggaacggagacctggtatgagagcctgcatgccgtgctgaaggctctaaatgccactcttcacagcaatttgctctgccggccagggccagggctggggccagacaaccagactgaagagaggcgggccagcctacctggccgtgatgacaactcctacatgtacattctctttgtcatgtttctatttgctgtaactgtgggcagcctcatcctgggatacacccgctcccgcaaagtggacaagcgtagtgacccctatcatgtgtatatcaagaaccgtgtgtctatgatctaacacgagagggctgggacggtggaagaccaagacacctggggattgcgtctggggcctccagaactctgctgtggactgcatcaggtct

SEQ ID NO: 106 - protein, 103 aa, Homo sapiens
METTNGTETWYESLHAVLKALNATLHSNLLCRPGPGLGPDNQTEERRASLPGRDDNSYMYILFVMFLFAVTVGSLILGYTRSRKVDKRSDPYHVYIKNRVSMI

SEQ ID NO: 107 - DNA, 1188 bp, Homo sapiens
gaaccctcttggactggacgatttgggaattcaaaacttgggacaaactgtcagccttgcccctgctgtggaggcagcctcaatgctgaaaatggagcctctgaacagcacgcaccccggcaccgccgcctccagcagccccctggagtcccgtgcggccggtggcggcagcggcaatggcaacgagtacttctacattctggttgtcatgtccttctacggcattttcttgatcggaatcgtgctgggctacatgaaatccaagaggcgggagaagaagtccagcctcctgctgctgtacaaagacgaggagcggctctggggggaggccatgaagtcgctgcccgtggtgtcgggcctgaggtcggtgcaggtgcccctgatgctgaacatgctgcaggagagcgtggcgcccgcgctgtcctgcaccctctgttccatggaaggggacagcgtgagctccgagtcctcctccccggacgtgcacctcaccattcaggaggagggggcagacgaggagctggaggagacctcggagacgcccctcaacgagagcagcgaagggtcctcggagaacatccatcagaattcctagcacccccgggacccctgcgggtggctccatcagccagcaaccttagagagaggaaagacagttttcaagtgtctggtttcactttcacagtgcggctgccactttgaagagacccttggtaaacccctgattcggggtggggtgggggactaggctcagccggaaccagcacctccaaggagtccgggaggtgcctgtggtttgcacccaccactgaaaaagccgcggagatgcgcagcgcgtacactgactttggggcctgggtgttggggttctgatcagaatttggcgggatgatatgcttgccattttctcactggatgccctgggtagctcctgcagggtctgcctgttcccagggctgccgaatgcttaggacacgctgagagactagttgtgatttgctattttgcctagagctttgtccttctagatctgattggctgtaagtatctctactgtgtacctgtggcattccttcacagtgggttacaagcttcttttggattagagggggatttttgatgggagaaagctggagatctgaacccagcccatttgccccctaaaaaaaaaaaaaaaaaaaaaaaaaa

SEQ ID NO: 108 - protein, 170 aa, Homo sapiens [sequence omitted]

SEQ ID NO: 109 - DNA, 1461 bp, Homo sapiens
cgcgctcgccggagagctgggtgctaccgctgtttccgctgctgagccctgcccgccggccggcccgctcgctagctcgcttcccctcgcccagggggaaaggtcagcagcgtcctggagccgccgtgtcactccccgaaagccatgaactgcagcgagagccagcggctgcgaacccttctgagccgcctgttgctcgagctgcaccaccggggtaatgccagcggcttgggcgctggccctcgtcccagcatgggcatgggggtcgtgcctgaccctttcgtgggccgcgaggtgaccagcgccaagggcgacgacgcctatctctacatcctgctcatcatgatcttctacgcctgcttggccggaggcctcatcctggcctacacccgctcccgtaagctcgtcgaggccaaggacgagccgtcccaggcttgcgccgagcacgaatgggccccgggaggcgccctgaccgccgacgccgaggctgccgcgggctcccaggccgagggccgccgccagcttgcctccgaggggctgcctgccctcgcccagggcgctgagcgggtctaaaaccacagccccagattgctggttcgcgccctcctcatctcgctcatccctgggcgcgcctcccaccttccacccccaactcccttccagggttcgcctcatctgaggcccagataatggtgagaggccaggagaccttgtctggaaggccctggaaggagaagcaccaccttacccattcgggccagtttctccctcttcacccctgcaccttccacccctaccccgcacatccaactgcactaaactgcctctgctctcttgtcttcagacagccctgacagcacgctccagccctctgggaactgaatccaacacgtccaacacttggcactgaactgaagcaatgcattctatcagaactctgggccgtctaactggcagctgctccaggggctgccagggactgctcactctgcagagccaacgggttgcaggccgactgcagcagtccagcttccagttgccttagggacagagacaagggaaatgaagagacctcagacatcttttccctccctctctctttcagcagggagctagcaggacactaggaccagtctgtgggatagaatgaacttaatgggggacggaagggggaggagtgctcaacggggagggaaatgatctatgactccaactgtatgattttcttgcctccccagttttcatcccagtggtaacgcctgatttttggtagctatgccatcttctgctgaggattaccattactgggtgtatcaccccagtacttccaaatgcctctcctctattgattcagttgttattgcagtgtctgcttcatccgtggaacttgaggctcagatgccccctgctctgtaaccctggggaatgtcagaggcaggtaataaaggttgtttaaacaat

SEQ ID NO: 110 - protein, 142 aa, Homo sapiens
MNCSESQRLRTLLSRLLLELHHRGNASGLGAGPRPSMGMGVVPDPFVGREVTSAKGDDAYLYILLIMIFYACLAGGLILAYTRSRKLVEAKDEPSQACAEHEWAPGGALTADAEAAAGSQAEGRRQLASEGLPALAQGAERV

SEQ ID NO: 111 - DNA, 651 bp, Homo sapiens
atgggggccgtcatgggcaccttctcatctctgcaaaccaaacaaaggcgaccctcgaaagataagattgaagatgagctggagatgaccatggtttgccatcggcccgagggactggagcagctcgaggcccagaccaacttcaccaagagggagctgcaggtcctttatcgaggcttcaaaaatgagtgccccagtggtgtggtcaacgaagacacattcaagcagatctatgctcagtttttccctcatggagatgccagcacgtatgcccattacctcttcaatgccttcgacaccactcagacaggctccgtgaagttcgaggactttgtaaccgctctgtcgattttattgagaggaactgtccacgagaaactaaggtggacatttaatttgtatgacatcaacaaggacggatacataaacaaagaggagatgatggacattgtcaaagccatctatgacatgatggggaaatacacatatcctgtgctcaaagaggacactccaaggcagcatgtggacgtcttcttccagaaaatggacaaaaataaagatggcatcgtaactttagatgaatttcttgaatcatgtcaggaggacgacaacatcatgaggtctctccagctgtttcaaaatgtcatgtaa

SEQ ID NO: 112 - protein, 216 aa, Homo sapiens
MGAVMGTFSSLQTKQRRPSKDKIEDELEMTMVCHRPEGLEQLEAQTNFTKRELQVLYRGFKNECPSGVVNEDTFKQIYAQFFPHGDASTYAHYLFNAFDTTQTGSVKFEDFVTALSILLRGTVHEKLRWTFNLYDINKDGYINKEEMMDIVKAIYDMMGKYTYPVLKEDTPRQHVDVFFQKMDKNKDGIVTLDEFLESCQEDDNIMRSLQLFQNVM

SEQ ID NO: 113 - protein, 270 aa, Homo sapiens
MRGQGRKESLSDSRDLDGSYDQLTGHPPGPTKKALKQRFLKLLPCCGPQVLPSVSETLAAPASLRPHRPRPLDPDSVDDEFELSTVCHRPEGLEQLQEQTKFTRKELQVLYRGFKNECPSGIVNEENFKQIYSQFFPQGDSSTYATFLFNAFDTNHDGSVSFEDFVAGLSVILRGTVDDRLNWAFNLYDLNKDGCITKEEMLDIMKSIYDMMGKYTYPALREEAPREHVESFFQKMDRNKDGVVTIEEFIESCQKDENIMRSMQLFDNVI

SEQ ID NO: 114 - DNA, 771 bp, Homo sapiens
atgcagccggctaaggaagtgacaaaggcgtcggacggcagcctcctgggggacctcgggcacacaccacttagcaagaaggagggtatcaagtggcagaggccgaggctcagccgccaggctttgatgagatgctgcctggtcaagtggatcctgtccagcacagccccacagggctcagatagcagcgacagtgagctggagctgtccacggtgcgccaccagccagaggggctggaccagctgcaggcccagaccaagttcaccaagaaggagctgcagtctctctacaggggctttaagaatgagtgtcccacgggcctggtggacgaagacaccttcaaactcatttacgcgcagttcttccctcagggagatgccaccacctatgcacacttcctcttcaacgcctttgatgcggacgggaacggggccatccactttgaggactttgtggttggcctctccatcctgctgcggggcacagtccacgagaagctcaagtgggcctttaatctctacgacattaacaaggatggctacatcaccaaagaggagatgctggccatcatgaagtccatctatgacatgatgggccgccacacctaccccatcctgcgggaggacgcgccggcggagcacgtggagaggttcttcgagaaaatggaccggaaccaggatggggtagtgaccattgaagagttcctggaggcctgtcagaaggatgagaacatcatgagctccatgcagctgtttgagaatgtcatctag

SEQ ID NO: 115 - protein, 256 aa, Homo sapiens
MQPAKEVTKASDGSLLGDLGHTPLSKKEGIKWQRPRLSRQALMRCCLVKWILSSTAPQGSDSSDSELELSTVRHQPEGLDQLQAQTKFTKKELQSLYRGFKNECPTGLVDEDTFKLIYAQFFPQGDATTYAHFLFNAFDADGNGAIHFEDFVVGLSILLRGTVHEKLKWAFNLYDINKDGYITKEEMLAIMKSIYDMMGRHTYPILREDAPAEHVERFFEKMDRNQDGVVTIEEFLEACQKDENIMSSMQLFENVI

SEQ ID NO: 116 - DNA, 100 bp, Homo sapiens
atgaacttggaagggcttgaaatgatagcagttctgatcgtcattgtgctttttgttaaattattggaacagtttgggctgattgaagcaggtttagaag

SEQ ID NO: 117 - protein, 33 aa, Homo sapiens
MNLEGLEMIAVLIVIVLFVKLLEQFGLIEAGLE

SEQ ID NO: 118 - DNA, 33 bp, Artificial Sequence
  Description of Artificial Sequence: Synthetic primer
gtctagaatgacggtgatgtcaggggagaatgc

SEQ ID NO: 119 - DNA, 37 bp, Artificial Sequence
  Description of Artificial Sequence: Synthetic primer
gctcgagaacatcggtcaggagcttgctcttattaac

SEQ ID NO: 120 - DNA, 35 bp, Artificial Sequence
  Description of Artificial Sequence: Synthetic primer
gtctagaatgacagtggctaccggagacccagtgg

SEQ ID NO: 121 - DNA, 37 bp, Artificial Sequence
  Description of Artificial Sequence: Synthetic primer
gctcgaggacatcagttaacattttggtaatattcac

SEQ ID NO: 122 - DNA, 43 bp, Artificial Sequence
  Description of Artificial Sequence: Synthetic primer
gctcgagttatcagacatcagttaacattttggtaatattcac

SEQ ID NO: 123 - DNA, 27 bp, Artificial Sequence
  Description of Artificial Sequence: Synthetic primer
agaataaacgctcaactttggcagatc

SEQ ID NO: 124 - DNA, 28 bp, Artificial Sequence
  Description of Artificial Sequence: Synthetic primer
ccagatccggtaccagatcgatctcgac

We claim:

1) A method of making a polymeric protein having a N-terminus and a C-terminus and a defined order of specific monomer subunits covalently linked, comprising:
a) amplifying one or more monomer nucleic acid species encoding a monomer subunit species to be contained in the polymeric protein;
b) creating a linker set comprising first, second, third and fourth designated nucleic acid linker pairs; wherein
1) each designated linker pair comprises a 5′ designated linker having a 5′ subcloning restriction endonuclease recognition site different from that of the 5′ designated linker of any other designated linker pair of said linker set;
2) a 3′ designated linker having a 3′ subcloning restriction endonuclease recognition site different from that of any other 3′ designated linker of any other designated linker pair of said linker set;
3) wherein each of the first, second, third, and fourth designated linker pairs is structured to correlate with a first, second, third, and fourth monomer subunit position, respectively, in the tetrameric protein; and
4) wherein
A) the 3′ subcloning restriction endonuclease recognition site of the first designated linker pair is the same as the 5′ subcloning restriction endonuclease recognition site of the second designated linker pair;
B) the 3′ subcloning restriction endonuclease recognition site of the second designated linker pair is the same as the 5′ subcloning restriction endonuclease recognition site of the third designated linker pair;
C) the 3′ subcloning restriction endonuclease recognition site of the third designated linker pair is the same as the 5′ subcloning restriction endonuclease recognition site of the fourth designated linker pair; and
c) individually joining amplified monomer nucleic acid species to 3′ and 5′ designated linkers of each of the first, second, third and fourth designated linker pairs to form a bank of first, second, third, and fourth in-frame nucleic acid monomer species constructs encoding a specific monomer subunit, each said construct having designated restriction site pairs at its 3′ and 5′ end correlating to one of four positions within the polymeric protein,
d) selecting a first, second, third, and fourth nucleic acid monomer species construct encoding the desired monomer subunit for each such position of the polymeric protein,
e) subcloning said first, second, third and fourth nucleic acid monomer species constructs into an expression vector having, in the 5′ to 3′ direction, restriction sites for joining with the 5′ restriction site of each of the first, second, third and fourth nucleic acid monomer species constructs, and a 3′ restriction site for joining with the 3′ end of the fourth nucleic acid monomer species construct, wherein the expression vector is structured to insert each nucleic acid monomer species construct in a common open reading frame, and
f) inserting said expression vector within a suitable host cell,
g) expressing within said host a polypeptide comprising a polymeric protein comprising a defined order of specific monomer subunits.

2. The method of claim 1 further comprising between steps a) and b) the steps:
A1) attaching to the 5′ end of each one or more monomer nucleic acid species a first cloning linker comprising a first cloning restriction endonuclease recognition site; and
A2) attaching to the 3′ end of each one or more monomer nucleic acid species a second cloning linker comprising a second cloning restriction endonuclease recognition site;
A3) cleaving each said one or more monomer nucleic acid species with said first and second restriction endonuclease; and
A4) joining each said monomer nucleic acid species with a first subcloning vector also cleaved with said first and second restriction endonuclease.

3) The method of claim 1 wherein at least one of the first, second, third and fourth designated linker pairs also contain an untranslated region of a Xenopus β-globin gene.

4) The method of claim 3 wherein each of the first, second, third and fourth designated linker pairs also contain an untranslated region of a Xenopus β-globin gene.

5) The method of claim 1 wherein the expression vector also contains a co-transcribed florescent protein tag for expression with and as part of the expressed polypeptide.

6) The method of claim 1 wherein the expression vector contains a co-transcribed green fluorescent protein tag for expression with the expressed polypeptide.

7) The method of claim 1 wherein the collection of different monomer subunit species comprises potassium channel α subunit species.

8) The method of claim 1 wherein the collection of different monomer subunit species comprises potassium channel α subunit species.

9) The method of claim 1 wherein the collection of different monomer subunit species comprises potassium channel αKv1.x subunit species.

10) A collection of nucleic acids comprising one or more nucleic acid monomer subunit species separately joined to each of first, second, third and fourth designated nucleic acid linker pairs of to make first, second, third, and fourth nucleic acid monomer subunit subspecies, wherein each designated nucleic acid linker pair comprises a 3′ subcloning restriction endonuclease recognition site and a 5′ subcloning restriction endonuclease recognition site, wherein;
a) the 3′ subcloning restriction endonuclease recognition site of the first designated linker pair is the same as the 5′ subcloning restriction endonuclease recognition site of the second designated linker pair;
b) the 3′ subcloning restriction endonuclease recognition site of the second designated linker pair is the same as the 5′ subcloning restriction endonuclease recognition site of the third designated linker pair;
c) the 3′ subcloning restriction endonuclease recognition site of the third designated linker pair is the same as the 5′ subcloning restriction endonuclease recognition site of the fourth designated linker pair; and wherein the first, second, third, and fourth nucleic acid monomer subunit subspecies are structured to maintain a common open reading frame when ligated together in the sequence, in the direction from 5′ to 3′, first, second, third, and fourth nucleic acid monomer subunit subspecies.

11) The collection of claim 10 comprising more than one nucleic acid monomer subunit species.

12) The collection of claim 10, wherein the fourth nucleic acid monomer subunit subspecies comprises an in-frame stop codon.

13) The collection of claim 10 comprising nucleic acid monomer subunit species encoding potassium channel α subunit monomers.

14) The collection of claim 10 comprising nucleic acid monomer subunit species encoding potassium channel αKv1.x subunit species.

15) A kit comprising a cassette cloning system for the expression of a concatenated multisubunit protein comprising;
a) a nucleic acid expression vector comprising a multiple cloning site having at least a first restriction nuclease recognition site and a second different nucleic acid recognition site located to the 3′ of the first site; and
b) a nucleic acid collection comprising one or more nucleic acid monomer subunit species separately joined to each of first, second, third and fourth designated nucleic acid linker pairs of to make first, second, third, and fourth nucleic acid monomer subunit subspecies, wherein each designated nucleic acid linker pair comprises a 3′ subcloning restriction endonuclease recognition site and a 5′ subcloning restriction endonuclease recognition site, wherein;
a) the 3′ subcloning restriction endonuclease recognition site of the first designated linker pair is the same as the 5′ subcloning restriction endonuclease recognition site of the second designated linker pair;
b) the 3′ subcloning restriction endonuclease recognition site of the second designated linker pair is the same as the 5′ subcloning restriction endonuclease recognition site of the third designated linker pair;
c) the 3′ subcloning restriction endonuclease recognition site of the third designated linker pair is the same as the 5′ subcloning restriction endonuclease recognition site of the fourth designated linker pair; and wherein the first, second, third, and fourth nucleic acid monomer subunit subspecies are structured to maintain a common open reading frame when ligated together in the sequence, in the direction from 5′ to 3′, first, second, third, and fourth nucleic acid monomer subunit subspecies,
wherein the 5′ subcloning restriction endonuclease recognition site of one nucleic acid monomer subunit subspecies is the same as the first vector restriction endonuclease recognition site, and the 3′ subcloning restriction endonuclease recognition site of another nucleic acid monomer subunit subspecies is the same as the second vector restriction endonuclease recognition site.

16) The kit of claim 15 comprising nucleic acid monomer subunit species encoding potassium channel α subunit monomers.

17) The kit of claim 16 comprising nucleic acid monomer subunit subspecies encoding potassium channel αKv1.x subunit species.

18) The kit of claim 15, wherein the fourth nucleic acid monomer subunit subspecies comprises an in-frame stop codon.

19) The kit of claim 15 wherein the expression vector is a bacterial expression vector.

20) The kit of claim 15 wherein the expression vector contains a nucleic acid sequence encoding a florescent protein.
